(19) United States
(12) Patent Application Publication
(10) Pub. No.: US 2007/0154889 A1
(43) Pub. Date: Jul. 5, 2007

(54) Methods and reagents for the detection of melanoma

(75) Inventor: Yixin Wang, San Diego, CA (US)

Correspondence Address: PHILIP S. JOHNSON;JOHNSON & JOHNSON, ONE JOHNSON & JOHNSON PLAZA, NEW BRUNSWICK, NJ, 08933-7003, US

(73) Assignee: VERIDEX, LLC, Warren, NJ (US)

(21) Appl. No.: 10/567,025

(22) PCT Filed: Jun. 24, 2005
(86) PCT No.: PCT/US05/22846

§ 371 Date: Aug. 16, 2006

Related U.S. Application Data
(60) Provisional application No. 60/582,906, filed on Jun. 25, 2004.
(60) Provisional application No. 60/612,951, filed on Sep. 24, 2004.
(60) Provisional application No. 60/649,725, filed on Feb. 3, 2005.

(51) Int. Cl. C12Q 1/68; C12P 19/34

(52) U.S. Cl. 435/6; 435/91.2

(57) ABSTRACT

An assay for identifying a malignant melanocyte is conducted by determining whether differential expression of particular genes is indicative of melanoma exceed a cut-off value. The assay can be performed intra-operatively on lymph node tissue.

### BACKGROUND OF THE INVENTION

[0001] Cutaneous malignant melanoma is a common, aggressive cancer with growing incidence. It is a serious healthcare problem with over 55,100 new cases anticipated in 2004 in US, and a mortality rate of about 14.5%. Cancer Facts and Figures 2003. American Cancer Society, 2003. The incidence of melanoma continues to rise faster than that of any other malignancy. De Braud et al. (2003). While prognosis of early local melanoma is favorable with 5-year overall survival over 90%, regional lymph node involvement decreases the overall survival rate to 10-46%. Balch et al. (2001). Therefore regional lymph node (LN) status becomes the most significant prognostic factor in a melanoma patient's survival. Introduction of the sentinel lymph nodes (SLN) technique (Morton (1992)) has increased the sensitivity of melanoma micrometastasis detection compared to H&E staining alone. Yu et al. (1999); and Messina et al. (1999). Nevertheless, even when enhanced by IHC, histological analysis is limited by the ability of light microscopy to recognize the tumor cells. Reverse transcription-polymerase chain reaction (RT-PCR) analysis has recently been proposed for a more sensitive detection of melanoma cells in LN. Many studies, when using well-characterized melanocyte specific markers, such as tyrosinase and MART-I, h [symbol] /e demonstrated the presence of these gene transcripts in LNs otherwise found to be negative by routine histology and IHC. Shivers et al. (1998); and Kuo et al. (2003). However, these genes are not specific to tumor cells and cannot be used to discriminate between benign and malignant tissue. hi fact, they caused false-positive results in the presence of benign capsular nevi. Takeuchi et al. (2004); Starz et al. (2003); and Gutzmer et al. (2002). Considering that benign nevi are not rare events in the melanoma SLN, the current RT-PCR assays are not useful clinically for diagnostic of melanoma micrometastasis. A recent study, proposed a multi-marker panel, including cancer specific markers for RT-PCR assay in order to increase assay specificity. Hoon et al. (2004). Identification of novel melanoma specific markers remains one of the key questions of melanoma research.

[0002] Certain proteins have been shown to be associated with melanoma and its metastases. These proteins or their activities have been used in IHC to identify metastases and include LlCAM (Thies et al. (2002); Fogel et al. (2003)); and S-100 (Diego et al. (2003)).

[0003] Nucleic acid tests have been proposed to increase the sensitivity of detection of metastatic melanoma. US Patent Publication Nos. 2002/01 10820; and 2003/0232356. Studies have used markers that include MAGE3, tyrosinase, MART-1, MITF-M or IL-I, R1, endothelin-2, ephrin-A5, IGF Binding protein 7, HLA-A0202 heavy chain, Activin A (βA subunit), TNF RII, SPC4, CNTF Ra, or gplOO (HMB45) genes. Bostick et al. (1999); Hoon et al. (2001); Palmieri et al. (2001); Wrightson et al. (2001); Gutzmer et al. (2002); Davids et al. (2003); Starz et al. (2003); Rimboldi et al. (2003); Cook et al (2003); Reintgen et al. (2004); US Patent Publication Nos. 2002/0098535; 2003/0049701; U.S. Pat. Nos. 5,512,437; 5,512,444; 5,612,201; 5,759,783; 5,844,075; 6,025,474; 6,057,105; 6,235,525; 6,291,430; 6,338,947; 6,369,211; 6,426,217; 6,475,727; 6,500,919; 6,527,560; 6,599,699; WO 96/29430. Where determined, these markers have not been found adequate for sole use in melanoma diagnosis. Riccioni et al. (2002); Gutzmer et al. (2002); Davids et al. (2003); Goydos et al. (2003); and Prichard et al. (2003).

[0004] A number of these markers have also been shown to be indicative of other neoplasias such as ME20M (GPlOO) for clear cell sarcoma, biliary tract carcinoma and gastric carcinoma. Hiraga et al. (1997); Okada et al. (2001); Okami et al. (2001); Antonescu et al. (2002); Segal et al. (2003). MAGE3 is also indicative of a number of neoplasias including breast, hepatocellular, renal, neural, lung and esophageal. Yamanaka et al. (1999); Ooka et al. (2000); Suzuki et al. (2000); Cheung et al. (2001); and Weiser et al. (2001). Several melanoma antigen-encoding genes are also expressed in lung cancer. Yoshimatsu et al. (1998).

[0005] These markers proved to be sensitive but non-specific since they showed positive expression in other cancers and benign melanocytes. Additionally, tyrosinase is expressed in Schwann cells which are present in normal lymph nodes. The lack of specificity alone calls for the development of assays with new or additional markers. H&E histology and IHC remain the “gold standard for the identification of melanoma and nevus cells in SLNs.” Starz et al. (2003). Detection issues in the intra-operative setting make this need even more acute.

[0006] Lymph node involvement is the strongest prognostic factor in many solid tumors, and detection of lymph node micrometastases is of great interest to pathologists and surgeons. Current lymph node evaluation involves microscopic examination of H&E-stained tissue sections and IHC and suffers from three major limitations: (a) small foci of cells, are easily missed; (b) the result is not rapidly available, meaning that any positive result in a SLN procedure requires a second surgery for removal of axcillary lymph nodes; and (c) only one or two tissue sections are studied, and thus the vast majority of each node is left unexamined. Serial sectioning can help overcome sampling error, and IHC can help identify small foci of cells; this combination, however, is costly and time consuming for routine analysis.

[0007] Surgical decisions of regional lymph node dissection can be based on intra-operative frozen section analysis of lymph nodes; however, the sensitivity of these methods is relatively poor, ranging from 50-70% relative to standard H&E pathology, leading to a high rate of second surgeries. Thus, pathologists are not routinely performing intra-operative frozen section analysis or touch print cytology analysis for melanoma patients. Improvements in the sensitivity and specificity of intra-operative assays for melanoma would significantly benefit oncology.

[0008] High-density microarrays have been applied to simultaneously monitor expression, in biological samples, of thousands of genes. Studies have resulted in the identification of genes differentially expressed in benign and malignant lesions, as well as genes that might be of prognostic value. Luo et al. (2001); and Wang et al. (2004). Gene expression profiling of malignant melanoma has been accomplished using a microarray containing probes for 8,150 cDNAs. Bittner et al. (2000). These researchers identified several genes that might be associated with aggressive tumor behavior. In recent work, comparison of gene expression profiles of a few melanoma and normal melanocyte cell lines led to the identification of differentially expressed genes and pathways modulated in melanoma. Takeuchi et al. (2004).

### SUMMARY OF THE INVENTION

[0009] Gene expression profiling of an extensive set of clinically relevant tissue samples is provided in the present invention. Total RNA from forty-five primary malignant melanomas, 18 benign skin nevi and 7 normal skin tissues were hybridized on an Affymetrix HuI 33A microarray containing 22,000 probe sets. Differentially expressed genes in malignant melanoma as compared to benign tissue were identified. Pathway analysis of the differentially expressed genes revealed an over-representation of genes associated with neural tissue development and activation of amyloid processing signaling pathway. A one-step quantitative RT-PCR assay was used to test a combination of two melanoma specific genes, PLAB and LlCAM in a panel of clinically relevant samples that included primary malignant melanoma, benign nevi, melanoma LN metastasis and melanoma-free lymph node samples.

[0010] The present invention provides a method of identifying a melanoma by obtaining a tissue sample; and assaying and measuring the expression levels in the sample of genes encoding mRNA corresponding to prostate differentiation factor (PLAB, MICl) (SEQ ID NO: 1) and Ll cell adhesion molecule (LlCAM) (SEQ ID NO: 2); or PLAB, LlCAM and neurotrophic tyrosine kinase receptor, type 3 (NTRK3) (SEQ ID NO: 3) where the gene expression levels above pre-determined cut-off levels are indicative of the presence of a melanoma in the sample. The invention farther provides a method of identifying a melanoma by obtaining a tissue sample; and assaying and measuring the expression levels in the sample of genes encoding mRNA recognized by the primer/probe sets SEQ ID NOs: 4-6 or SEQ ID NOs: 7-9 and SEQ ID NOs: 10-12 or SEQ ID NOs: 13-15; or SEQ ID NOs: 4-6 or SEQ ID NOs: 7-9 and SEQ ID NOs: 10-12 or SEQ ID NOs: 13-15 and SEQ ID NOs: 16-18 where the gene expression levels above pre-determined cut-off levels are indicative of the presence of a melanoma in the sample.

[0011] The invention also provides a method of distinguishing a malignant melanocyte from a benign melanocyte by obtaining a tissue sample; and assaying and measuring the expression levels in the sample of genes encoding PLAB and LlCAM; or PLAB, LlCAM and NTRK3 where the gene expression levels above pre-determined cut-off levels are indicative of the presence of a melanoma in the sample.

[0012] The invention also provides a method of distinguishing a malignant melanocyte from a benign melanocyte by obtaining a tissue sample; and assaying and measuring the expression levels in the sample of genes recognized by the primer/probe sets SEQ ID NOs: 4-6 or SEQ ID NOs: 7-9 and SEQ ID NOs: 10-12 or SEQ ID NOs: 13-15; or SEQ ID NOs: 4-6 or SEQ ID NOs: 7-9 and SEQ ID NOs: 10-12 or SEQ ID NOs: 13-15 and SEQ ID NOs: 16-18 where the gene expression levels above pre-determined cut-off levels are indicative of the presence of a melanoma in the sample.

[0013] The invention further provides a method of determining patient treatment protocol by obtaining a tissue sample from the patient; and assaying and measuring the expression levels in the sample of genes encoding PLAB and LlCAM; or PLAB, LlCAM and NTRK3 where the gene expression levels above pre-determined cut-off levels are indicative of the presence of a melanoma in the sample.

[0014] The invention further provides a method of determining patient treatment protocol by obtaining a tissue sample from the patient; and assaying and measuring the expression levels in the sample of genes recognized by the primer/probe sets SEQ ID NOs: 4-6 or SEQ ID NOs: 7-9 and SEQ ID NOs: 10-12 or SEQ ID NOs: 13-15; or SEQ ID NOs: 4-6 or SEQ ID NOs: 7-9 and SEQ ID NOs: 10-12 or SEQ ID NOs: 13-15 and SEQ ID NOs: 16-18 where the gene expression levels above pre-determined cut-off levels are indicative of the presence of a melanoma in the sample.

[0015] The invention further provides additional Marker and control genes, the expression of which aid in the claimed methods. These additional genes include up-regulated SEQ ID NOs: 29-467 and down-regulated SEQ ID NOs: 468-978.

[0016] The primary Marker can be PLAB and is defined herein as the gene encoding any variant, allele etc. including SEQ ID NO: 1. PLAB is also described by Paralkar et al. (1998) and represented by Accession No. AF003934. PLAB is also defined as the gene encoding mRNA recognized by the primer/probe sets SEQ ID NOs: 4-9.

[0017] The secondary Marker can be LlCAM and is defined herein as the gene encoding any variant, allele etc. including SEQ ID NO: 2. LlCAM is also described by Haspel et al (2003); and U.S. Pat. No. 6,107,476 and is represented by Accession No. NM_{—}000425. LlCAM is also defined as the gene encoding mRNA recognized by the primer/probe sets SEQ ID NOs: 10-15.

[0018] The invention further provides a kit for conducting an assay to determine the presence of melanoma in a cell sample comprising: nucleic acid amplification and detection reagents.

[0019] The invention further provides primer/probe sets for amplification and detection of PCR products obtained in the inventive methods. These sets include the following:

SEQ ID NO:4 (PLAB forward primer)
ggcagaatcttcgtccgca
SEQ ID NO:5 (PLAB reverse primer)
ggacagtggtccccgttg
SEQ ID NO.6 (PLAB probe)
cccagctggagttgcacttgcggcc
SEQ ID NO:7 (PLAB upper primer)
gaacaccgacctcgtccc
SEQ ID NO:8 (PLAB lower primer)
ggcggcccgagagata
SEQ ID NO:9 (PLAB probe)
cgccagaagtgcggctgggattt
SEQ ID NO:10 (L1CAM forward)
gctgggactgggaacagaact
SEQ ID NO:11 (L1CAM Reverse)
ggagcagagatggcaaagaaa
SEQ ID NO:12 (L1CAM probe)
ttccccaccatctgctgt
SEQ ID NO:13 (L1CAM upper)
ccacagatgacatcagcctcaa
SEQ ID NO:14 (L1CAM lower)
ggtcacacccagctcttcctt
SEQ ID NO:15 (L1CAM probe)
tggcaagcccgaagtgcagttcctt
SEQ ID NO:16 (NTRK3 primer)
gccccggcacccttta
SEQ ID NO:17 (NTRK3 primer)
aaccctgccagtggtggat
SEQ ID NO:18 (NTRK3 probe)
cagatgggtgttttc
SEQ ID NO:19 (Tyr upper)
actcagcccagcatcattcttc
SEQ ID NO:20 (Tyr lower)
atggctgttgtactcctccaatc
SEQ ID NO:21 (Tyr probe)
cttctcctcttggcagattgtctgtagctt
SEQ ID NO:22 (PBGD upper)
ccacacacagcctactttccaa
SEQ ID NO:23 (PBGD lower)
tacccacgcgaatcactctca
SEQ ID NO:24 (PBGD probe)
aacggcaatgcggctgcaacggcggaatt

[0020] The invention further provides amplicons obtained by PCR methods utilized in the inventive methods. These amplicons include the following:

SEQ ID NO:25 (PLAB Amplicon)
gaacaccgacctcgtcccggcccctgcagtccggatactcacgccagaag
tgcggctgggatccggcggccacctgcacctgcgtatctctcgggccgcc
SEQ ID NO:26 (L1CAM Amplicon)
ccacagatgacatcagcctcaagtgtgaggccagtggcaagcccgaagtg
cagttccgctggacgagggatggtgtccacttcaaacccaaggaagagct
gggtgtgacc
SEQ ID NO:27 (tyrosinase Amplicon)
actcagcccagcatcattcttctcctcttggcagattgtctgtagccgat
tggaggagtacaacagccat
SEQ ID NO:28 (PBGD Amplicon)
ccacacacagcctactttccaagcggagccatgtctggtaacggcaatgc
ggctgcaacggcggaagaaaacagcccaaagatgagagtgattcgcgtgg
gta

[0021] Other genes described herein include up-regulated Markers (SEQ ID NOs: 29-467), down-regulated Markers (SEQ ID NOs: 468-978), PBGD (SEQ ID NO: 979), MARTl (SEQ ID NO: 980), ME20M (GPlOO; SEQ ID NO: 981) and MAGE-3 (SEQ ID NO: 982) and various primers and probes (SEQ ID NOs: 983-1011) used in detecting their expression.

### BRIEF DESCRIPTION OF THE DRAWINGS

[0022] FIG. 1. Flowchart of data analysis.

[0023] FIG. 2. Hierarchical clustering on the 15,795 genes that have at least two “present” calls in all samples. Each column is a sample and each row is a gene. Red is up-regulation and green is down-regulation. Purple: melanoma samples; yellow: benign nevi; and blue: normal skin.

[0024] FIG. 3. Microarray expression (A) and real time RT-PCR validation data (B) of the selected genes. First fourteen samples from the left are the melanoma tissue samples (red); next seven are benign nevi samples (yellow) and last five are normal skin (blue). For microarray plots x-axis shows intensity values; for PCR plots, x-axis is 2^{ΔCT}, where ΔCt is Ct (Target Gene)—Ct PBGD.

[0025] FIG. 4. Amyloid processing pathway. Adopted from Ingenuity™ Pathway Analysis Software Application. Genes up-regulated in melanoma are red and down-regulated in melanoma are green. Each gene symbol is followed by the fold-change of expression level between melanoma and benign/normal samples.

[0026] FIG. 5. One-step quantitative RT-PCR assay of PLAB and LlCAM (A) and conventional melanoma markers, gplOO, tyrosinase (SEQ ID NO: 999) and MARTl (B). For each plot x-axis represents score for the new markers or the conventional markers. Median scores for each samples category are labeled. Two cut-off levels based on normal (green) and benign (red) samples are labeled on each plot.

### DETAILED DESCRIPTION

[0027] The present invention provides methods of qualitatively and quantitatively identifying a melanoma; distinguishing a malignant melanocyte from a benign melanocyte; diagnosing melanocytic lesions with uncertain pathological features; and determining a melanoma patient treatment protocol. The methods further provide aids in patient prognosis, patient monitoring and drug development. The methods rely on assaying and measuring expression levels of various Marker genes encoding mRNAs provided herein where gene expression over a pre-determined cut-off level is indicative of the presence of a malignant melanocyte in the sample assayed.

[0028] Cutaneous melanoma is a common, aggressive cancer with growing incidence. Identification of melanoma-specific deregulated genes could provide molecular markers for LN staging assays and further insight on melanoma tumorigenesis. Total RNA isolated from 45 primary melanoma, 18 benign skin nevi, and 7 normal skin tissue specimens were analyzed on an Affymetrix U133A microarray containing 22,000 probe sets. Hierarchical clustering revealed a distinct separation of the melanoma samples from benign and normal specimens. Novel genes associated with malignant melanoma were identified. Differential gene expression of two melanoma specific genes, PLAB and LlCAM, were tested by a one-step quantitative RT-PCR assay on primary malignant melanoma, benign nevi and normal skin samples and also on malignant melanoma LN metastasis and melanoma-free lymph nodes. The performance of the markers was compared to conventional melanoma markers such as tyrosinase, gplOO, and MARTl. The results demonstrated the ability of using a combination of PLAB and LlCAM in a RT-PCR assay to differentiate clinically relevant tissue samples containing benign or malignant melanocytes.

[0029] High-density cDNA and oligonucleotide microarrays allow simultaneous monitoring of the expression of thousands of genes. Microarray technology provides a quantitative measurement of mRNA abundance and has gained acceptance as a tool for marker discovery based on gene expression. In the context of cancer research, microarray analysis has identified genes differentially expressed in benign and malignant lesions, different cancer types or that have prognostic significance. Luo et al. (2001); Su et al. (2001); Henshall et al. (2003); and Wang et al. (2004). The first gene expression profiling of malignant melanoma used a microarray containing probes for 8,150 cDNAs and identified genes that might be associated with aggressive tumor behavior. Bittner et al. (2000). Since the samples analyzed in their study did not include tissues containing normal or benign melanocytes, differentially expressed genes in malignant melanoma were not identified. hi contrast to normal skin, melanocyte content in benign nevi is close to that in melanoma.

[0030] In another study, two pooled samples derived from either melanoma or benign nevi tissues were hybridized to a cDNA array and genes preferentially expressed in melanoma- or nevi-derived samples were found. Seykora et al. (2003). Other researchers used subtractive hybridization or analysis of SAGE libraries generated on melanoma cell lines, for monitoring gene expression in melanoma. Hipfel et al. (2000); and Weeraratna (2004). Recently, comparison of gene expression profiles of a few melanoma and melanocyte cell lines led to the identification of differentially expressed genes and pathways modulated in melanoma. Hoek et al. (2004). While these studies provide a solid foundation for melanoma genetics, there is no marker that can clearly differentiate melanoma from benign tissue. Several markers currently used such as tyrosinase and Mart-1 cannot discriminate between benign and malignant tissue. Takeuchi et al. (2004). Consequently, these markers have limited use in applications such as intra-operative, lymph-node-based staging of disease.

[0031] Difficulties in obtaining sufficient RNA samples from malignant melanoma and benign melanocyte lesions, tissue heterogeneity, and the presence of melanin in purified RNA remain the major challenges in these studies. In the study presented herein, total RNA isolated from 45 primary malignant melanomas, 18 benign skin nevi, and 7 normal skin tissues were hybridized on an Affymetrix HuI 33A microarray containing 22,000 probe sets. A modified RNA extraction method was developed to produce melanin-free RNA samples that increased the micorarray hybridization signals. Hierarchical clustering revealed distinct separation of the melanoma samples from benign and normal specimens. Significance Analysis of Microarray (SAM) method, t-test and percentile analysis identified 439 up-regulated (SEQ ID NOs: 29-467) and 511 down-regulated (SEQ ID NOs: 468-978) genes in the melanoma samples. Besides well-characterized genes such as me20m (gplOO), melanocortin receptor 1, and LlCAM, many novel genes previously unassociated with melanoma were identified including NTKR3 and PLAB. Pathway analysis of the differentially expressed genes revealed an over-representation of genes associated with neural tissue development and function, activation of amyloid processing and integrin signalling pathways. RT-PCR assays were performed to confirm the differential expression of the selected genes.

[0032] The methods provided have sufficient specificity and sensitivity to detect metastasis of melanoma. A comparison of the current methods available indicates that tradition methods of H&E and IHC are clinically acceptable whereas, prior to the current invention, PCR methods were unacceptable. Table 1 shows the drawbacks and advantages of current methods prior to the invention claimed herein.

TABLE 1

| Method | Sensitivity | Specificity |
|---|---|---|
| H&E | Low | 100% |
| IHC | Low | 100% |
| PCR | High | Low |

[0033] In the present invention, specificity is preferably at least 95%, more preferably, specificity is at least 97% and most preferably, specificity is at least 99% based on a comparison of H&E and IHC negative nodes. Preferably, sensitivity is at least at least 80%, more preferably sensitivity is at least 85% and most preferably, sensitivity is at least 90% based on a comparison of H&E and IHC positive nodes. Preferably, specificity and sensitivity are at least 97% based on a comparison of H&E and IHC negative nodes and at least 85% based on a comparison of H&E and IHC positive nodes, respectively.

[0034] Preferably, the pre-determined cut-off levels are at least two-fold over-expression in tissue having metastatic melanoma relative to benign melanocyte or normal tissue.

[0035] The preferred methods of the invention employ a rapid technique for extracting nucleic acids from a tissue sample and a method of amplifying and detecting nucleic acid fragments indicative of metastasis. The nucleic acid fragments qualitatively and quantitatively measure mRNA encoded by the Marker genes. Tissue samples include lymph node, both regional and sentinel, skin lesions and other biopsy material.

[0036] The methods provided herein allow for intra-operative detection of micrometastases allowing a physician to determine whether to excise additional lymph nodes and to immediately implement an appropriate treatment protocol. As shown in Table 2, if a LN is found to be positive for melanoma, regional LNs are excised and interferon therapy could be suggested. Standard biopsy methods can take over one week and a positive result requires additional surgery to remove LNs and there is a concomitant delay in interferon therapy.

TABLE 2

| Clinical Stage | 1° Tumor (T) | LN | Metastasis | Treatment |
|---|---|---|---|---|
| Stage I | T1: ≦1 mm | Negative | Absent | Excision 1 cm |
| | T2: 1.01-2.00 mm | Negative | Absent | Excision 1-2 cm |
| Stage II | T3: 2.01-4.00 mm | Negative | Absent | Excision 2 cm |
| | T4: >4.01 mm | Negative | Absent | Excision 2 cm |
| Stage III | Any thickness | Positive | Absent | Excision + complete LN |
| | | | | dissection + interferon |
| | | | | clinical trial |
| Stage IV | Any thickness | Positive | Present | Interferon clinical trial, |
| | | | | symptomatic therapy |

[0037] It is important to adequately sample the tissue used to conduct the assay. This includes proper excision and processing of the tissue sample as well as extraction of RNA. Once obtained, it is important to process the tissue samples properly so that any cancerous cells present are detected.

[0038] In the most preferred embodiment of the invention, node sampling is also given attention both intra- and extra-operatively. Since the distribution of cancer cells in nodes is non-uniform, it is preferable that multiple sections of the node be sampled. Every identified SLN should be submitted for pathological evaluation. SLN material is ordinarily be fixed in formalin and examined as formalin fixed, paraffin embedded tissue sample. Equally representative parts of SLN are processed for molecular analysis (fresh tissue) and histology (fixed tissue). General LN sampling procedures are described in Cochran et al. (2001); and Cochran et al. (2004). One method for accomplishing both a molecular based test and an examination of the same node sample by pathology is to bisect the node through the longest diameter. Each half is then divided into at least four full-faced sections with at least one outer and inner section for pathology as fixed material, and at least one outer and inner section for molecular testing. As the distribution of metastases and micrometastases is not uniform in nodes or other tissues, a sufficiently large sample should be obtained so that metastases will not be missed. One approach to this sampling issue in the present method is to homogenize a large tissue sample, and subsequently perform a dilution of the well-mixed homogenized sample to be used in subsequent molecular testing.

[0039] In the case of LN tissue samples, it is preferable to remove any adipose tissue prior to cellular disruption. Manual cell and tissue disruption can be by any means known in the art such as a disposable tissue grinder described in U.S. Pat. No. 4,715,545 or a commercial homogenizer such as Omni GLHl 15 with disposable probes (Omni International, Warrenton, Va.). Homogenization time is within 1 to 2 minutes and is more preferably 30-45 sec. The sample can then be processed to purify the RNA prior to assaying and measuring Marker expression levels. Suitable RNA purification methods include columns such as (e.g., RNeasy mini column, QIAshredder, QIAGEN Inc., Valencia, Calif., or a suitable substitute).

[0040] A variety of techniques are available for extracting nucleic acids from tissue samples. Typical commercially available nucleic acid extraction kits take at least 15 minutes to extract the nucleic acid. In the preferred intra-operative methods of the instant invention, nucleic acid is extracted in less than 8 minutes and preferably less than 6 minutes.

[0041] The successful isolation of intact RNA generally involves four steps: effective disruption of cells or tissue, denaturation of nucleoprotein complexes, inactivation of endogenous ribonuclease (RNase) and removal of contaminating DNA and protein. The disruptive and protective properties of guanidinium isothiocyanate (GITC) and β-mercaptoethanol (β-me) to inactivate the ribonucleases present in cell extracts make them preferred reagents for the first step. When used in conjunction with a surfactant such as sodium dodecylsulfate (SDS), disruption of nucleoprotein complexes is achieved allowing the RNA to be released into solution and isolated free of protein. Tissues are homogenized in the GITC-containing lysis buffer, addition of ethanol creates the appropriate conditions for RNA to bind to the silica membrane. Centrifugation can clear the lysate of precipitated proteins and cellular DNA and is preferably performed through a column. RNA purification is preferably conducted on a spin column containing silica or other material.

[0042] RNA is precipitated via the spin column as described above and centrifugation times are preferably no greater than 30 sec. Typically, the sample is diluted with an equal volume of 70% ethanol and thoroughly mixed prior to applying to the column. After washing, the column is dried by centrifugation, and RNA is eluted in RNase free water and collected by centrifugation. The total time of this rapid protocol is less than 8 minutes and preferably less than 6 min.

[0043] In summary the rapid RNA extraction method involves the following steps:
[0044] obtaining a tissue sample;
[0045] homogenizing the tissue to produce a homogenate;
[0046] contacting the homogenate with a substrate containing, or to which is affixed, an RNA-binding material;
[0047] allowing the RNA to bind to the RNA binding material;
[0048] washing the substrate under conditions sufficient to remove any contaminants, interferents and un-bound RNA; and
[0049] eluting bound RNA from the substrate.

[0050] The reagents involved in this rapid extraction process can be those provided by the manufacturer or can be, for instance:
[0051] Lysis/Binding buffer (preferably, 4.5M GITC, 10 OmM NaPO₄),
[0052] Wash buffer I (preferably, 37% ethanol in 5M GITC, 2 OmM Tris-HCl),
[0053] Wash buffer II (preferably, 80% ethanol in 2 OmM NaCl, 2 mM Tris-HCl), and
[0054] Nuclease-free sterile double distilled water for elution.

[0055] In one method, prior to the process for isolating nucleic acids described above, tissue samples are weighed and put into 8 or 14 ml polypropylene culture tubes and pre-cooled on dry ice. The frozen tissue samples are then divided into pieces of about 50 mg or less without being thawed. All buffers are those provided by QIAGEN in the RNeasy mini kit. A volume of homogenization (lysis) buffer is added to the tissue based on Table 3.

TABLE 3

| Tissue Weight (mg) | Homogenization buffer (ml) |
|---|---|
| ≦100 | 2 |
| 100-149 | 2 |
| 150-199 | 3 |
| 200-249 | 4 |
| 250-299 | 5 |
| 300-349 | 6 |
| 350-399 | 7 |
| 400-449 | 8 |
| 450-400 | 9 |
| 500-550 | 10 |
| >550 | * |

* Tissue above 550 mg is divided into equivalent parts and processed as individual samples. An alternative method to calculate lysis buffer volume for tissues over 100 mg is to add 1 ml per 50 mg tissue; using 2 ml for tissues less than 100 mg.

[0056] The tissue sample is then homogenized for instance by the Omni GLHl 15 at a power setting to grade 6, Adaptor AlOOO and disposable probes. The homogenate is then mixed with an equal volume of 70% ethanol and thoroughly mixed for instance by vortexing on a VWR Model G560 set at 10 speed (maximum) about 10 seconds or by pipetting 4-5 times. The homogenate/ethanol mixture is then applied to an RNeasy mini column mounted on a vacuum manifold in a volume in accordance with Table 4 so that a consistent amount of the original tissue (approximately 5 mg/column) is loaded thus producing comparable RNA yields for each tissue sample.

TABLE 4

| Tissue weight | Volume homogenate/ethanol |
|---|---|
| (mg) | mix (μl) (recommended) |
| 30-39 | 700 |
| 40-49 | 500 |
| 50-59 | 400 |
| 60-69 | 350 |
| 70-79 | 300 |
| 80-89 | 250 |
| 90-99 | 225 |
| >100 | 200 |

[0057] A vacuum is then applied to the column to remove the liquid. The vacuum is stopped and two washes of 700 ml are applied, first with RWI buffer and second with RPE buffer each removed by filtration. Vacuum is at 800-1200 mBar in each case. The column is then placed into a 1.5 ml collection tube and centrifuged in an Eppendorf 5415D centrifuge at 13,200 rpm for 30 seconds to dry. The column is transferred to a new 1.5 ml collection tube. Fifty μl RNase-free water is directly added to the membrane and the column is centrifuged in an Eppendorf 541 5D centrifuge for 30 seconds at 13,200 rpm to elute the RNA. The RNA quality is determined with an Agilent Bioanalyzer and the RNA is stored at −70° C.

[0058] Melanin can negatively impact the efficiency of reversed transcription and amplification reactions. Accordingly, a melanin removal process is undertaken when the sample is suspected of containing a significant amount of melanin (as in the case of samples of a primary melanoma or benign skin nevi) and is less of a concern when performing the assay on a SLN since melanocyte content is low. If necessary, melanin is removed to enhance reverse transcription and/or nucleic acid amplification.

[0059] Typically, melanin is removed during the filtration steps provided above. In the case of tissue with high melanin concentration, less tissue should be used, approximately 5 mg per Qiagen RNeasy mini column.

[0060] If another method is used that results in residual melanin in the sample, removal involves the use of a matrix employing a polymer bead system such as Bio-Gel P-60 (Bio-Rad Laboratories, Hercules, Calif.). Such a method is described by Satyamoorthy et al. (2002). Essentially, this method involves preparing a 50% (w/v) mixture of the Bio-Gel material in 10 mM sodium acetate (pH 4.2). About 300 μl of the mixture are placed in a micro-centrifuge tube and centrifuged at lOOOrpm for 1 min. The supernatant is discarded and the beads are placed in a mini-column or similar vessel. Homogenate is then passed through the vessel containing the beads (after first incubating them in the vessel). The supernatant is collected. Further washing of the beads with additional 100 μl aliquots of 10 mM sodium acetate can be used to capture additional volumes of melanin-free sample if necessary for adequate assay volume. The dark melanin will be clearly visible on the beads retained in the vessel. Other silica-based filters can also be used to remove the melanin pigment as described by Wang et al. (2001).

[0061] An important aspect of the intra-operative methods of the invention is rapid Marker detection. Provided that such methods can be conducted within a period acceptable for an intra-operative assay (i.e., no more than about 35 minutes), any reliable, sensitive, and specific method can be used.

[0062] In the case of measuring mRNA levels to determine gene expression, assays can be by any means known in the art and include methods such as PCR, Rolling Circle Amplification (RCA), Ligase Chain Reaction (LCR), Strand Displacement Amplification (SDA), Nucleic Acid Sequence Based Amplification (NASBA), and others. The rapid molecular diagnostics involved are most preferably quantitative PCR methods, including QRT-PCR. Detection can be by any method known in the art including microarrays, gene chips and fluorescence.

[0063] A typical PCR includes multiple amplification steps, or cycles that selectively amplify target nucleic acid species. A typical PCR includes three steps: a denaturing step in which a target nucleic acid is denatured; an annealing step in which a set of PCR primers (forward and backward primers) anneal to complementary DNA strands; and an elongation step in which a thermostable DNA polymerase elongates the primers. By repeating this step multiple times, a DNA fragment is amplified to produce an amplicon, corresponding to the target DNA sequence. Typical PCR includes 20 or more cycles of denaturation, annealing and elongation. Often, the annealing and elongation steps can be performed concurrently, in which case the cycle contains only two steps.

[0064] In the preferred inventive method, employing RT-PCR, the RT-PCR amplification reaction is conducted in a time suitable for intra-operative diagnosis, the lengths of each of these steps can be in the seconds range, rather than minutes. Specifically, with certain new thermal cyclers being capable of generating a thermal ramp rate of at least about 5 C° per second, RT-PCR amplifications in 30 minutes or less are used. More preferably, amplifications are conducted in less than 25 minutes. With this in mind, the following times provided for each step of the PCR cycle do not include ramp times. The denaturation step may be conducted for times of 10 seconds or less. In fact, some thermal cyclers have settings for “0 seconds” which may be the optimal duration of the denaturation step. That is, it is enough that the thermal cycler reaches the denaturation temperature. The annealing and elongation steps are most preferably less than 10 seconds each, and when conducted at the same temperature, the combination annealing/elongation step may be less than 10 seconds. Some homogeneous probe detection methods, may require a separate step for elongation to maximize rapid assay performance. In order to minimize both the total amplification time and the formation of non-specific side reactions, annealing temperatures are typically above 50° C. More preferably annealing temperatures are above 55° C.

[0065] A single combined reaction for RT-PCR, with no experimenter intervention, is desirable for several reasons: (1) decreased risk of experimenter error; (2) decreased risk of target or product contamination; and (3) increased assay speed. The reaction can consist of either one or two polymerases. In the case of two polymerases, one of these enzymes is typically an RNA-based DNA polymerase (reverse transcriptase) and one is a thermostable DNA-based DNA polymerase. To maximize assay performance, it is preferable to employ a form of “hot start” technology for both of these enzymatic functions. U.S. Pat. Nos. 5,411,876 and 5,985,619 provide examples of different “hot start” approaches. Preferred methods include the use of one or more thermoactivation methods that sequester one or more of the components required for efficient DNA polymerization. U.S. Pat. Nos. 5,550,044 and 5,413,924 describe methods for preparing reagents for use in such methods. U.S. Pat. No. 6,403,341 describes a sequestering approach that involves chemical alteration of one of the PCR reagent components. In the most preferred embodiment, both RNA- and DNA-dependent polymerase activities reside in a single enzyme. Other components that are required for efficient amplification include nucleoside triphosphates, divalent salts and buffer components. In some instances, non-specific nucleic acid and enzyme stabilizers may be beneficial.

[0066] In the preferred RT-PCR, the amounts of certain reverse transcriptase and the PCR components are atypical in order to take advantage of the faster ramp times of some thermal cyclers. Specifically, the primer concentrations are very high.

[0067] Typical gene-specific primer concentrations for reverse transcriptase reactions are less than about 20 nM. To achieve a rapid reverse transcriptase reaction on the order of one to two minutes, the reverse transcriptase primer concentration is raised to greater than 20 nM, preferably at least about 50 nM, and typically about 100 nM. Standard PCR primer concentrations range from 100 nM to 300 nM. Higher concentrations may be used in standard PCR to compensate for Tm variations. However, for the purposes herein, the referenced primer concentrations are for circumstances where no Tm compensation is needed. Proportionately higher concentrations of primers may be empirically determined and used if Tm compensation is necessary or desired. To achieve rapid PCR, the PCR primer concentrations typically are greater than 250 nM, preferably greater than about 300 nM and typically about 500 nM.

[0068] Commercially used diagnostics also preferably employ one or more internal positive control that confirms the operation of a particular amplification reaction in case of a negative result. Potential causes of false negative results that must be controlled in an RT-PCR include: inadequate RNA quantity, degradation of RNA, inhibition of RT and/or PCR and experimenter error.

[0069] In the case of measuring protein levels to determine gene expression, any method known in the art is suitable provided it results in adequate specificity and sensitivity. For example, protein levels can be measured by binding to an antibody or antibody fragment specific for the protein and measuring the amount of antibody-bound protein. Antibodies can be labeled by radioactive, fluorescent or other detectable reagents to facilitate detection. Methods of detection include, without limitation, enzyme-linked immunosorbent assay (ELISA) and immunoblot techniques.

[0070] The invention provides specificity and sensitivity sufficient to identify a malignant melanocyte in a tissue sample. The methods determine expression of particularly Marker genes by measuring mRNA encoded by the Markers. The preferred Markers of the invention display at least a two-fold over-expression in tissue having malignant melanocytes relative to benign melanocyte or normal tissue. The results presented herein show that a primary Marker is insufficient to provide clinically relevant information but, when combined with one or more secondary Markers, the information obtained compares to the “gold standard” of H&E and IHC upon which clinicians currently rely. Tertiary Markers and control genes can augment the primary and secondary Markers to further increase specificity and/or sensitivity.

[0071] As described in the following Examples, the Markers were identified by the protocol depicted in FIG. 1. Thus, the invention provides a method for identifying melanoma-specific Markers by following the protocol in FIG. 1 and the Examples provided herein.

[0072] The primary Marker can be PLAB and is defined herein as the gene encoding any variant, allele etc. including SEQ ID NO: 1. PLAB is also described by Paralkar et al. (1998) and represented by Accession No. AF003934. PLAB is linked to the pathogenesis of prostate cancer (Liu et al (2003); Karan et al. (2003); and Nakamura et al. (2003); U.S. Pat. Nos. 5,994,102; 6,107,476; 6,465,181; 6,500,638; 6,521,227; US Patent Publication Nos. 2002/0048784; 2003/0013097; and 2003/0059431) and colorectal cancer (Brown et al. (2003); Buckhaults et al. (2001); and US Patent Publication No. 2002/0160382).

[0073] The secondary Marker is LlCAM and is defined herein as the gene encoding any variant, allele etc. including SEQ ID NO: 2. LlCAM is also described by Haspel et al (2003); and U.S. Pat. Nos. 5,872,225; and 5,969,124 and is represented by Accession No. NM_{—}000425.

[0074] The invention further provides tertiary markers that fall into several functional categories. Thus, additional Markers can be used that are found in these functional categories. As described in more detail in the Examples, melanoma-specific up-regulated genes fall into the functional categories of neural tissue development and cell cycle control and melanoma-specific down-regulated genes fall into the functional categories of tissue development and cell differentiation.

[0075] The tertiary Markers include SEQ ID NOs: 3, 29-978 and 999. A number of tertiary markers are described in Table 5 and all are summarized in Table 15.

[0076] NTRK3 is described by Strausberg et al. (2002); Marchetti et al. (2003); Hisaoka et al. (2002); McGregor et al. (1999); Ryden et al. (1996); U.S. Pat. Nos. 5,348,856; 5,844,092; 5,910,574; and US Patent Publication Nos. 2002/0155480; and 2003/014283 and is represented by Accession No. BC013693 or S76476.1. NTRK3 is also defined as the gene encoding mRNA recognized by the primer/probe sets SEQ ID NOs: 16-18.

[0077] Tyrosinase is described by Mandelcorn-Monson et al. (2003); and U.S. Pat. No. 6,153,388 and is represented by Accession No. NM_{—}000372. Tyrosinase is also defined as the gene encoding mRNA recognized by the primer/probe sets SEQ ID NOs: 19-21.

TABLE 5

| Gene | Reference | Accession # |
|---|---|---|
| PBGD | Raich et al. (1986) | NM_000190 |
| CITED1 | Fenner et al. (1998) | NM_004143 |
| PEX6 | Raas-Rothschild et al. (2002) | NM_000287 |
| CAPG | Van Impe et al. (2003) | NM_001747 |
| DUSP4 | Smith et al. (1997) | NM_001394 |
| GDF1 | Ducy et al. (2000) | NM_001492 |
| E2-EpF | Liu et al. (1992) | NM_014501 |
| me20m | Maresh et al. (1994) | U01874 |
| CDH3 | Patel et al. (2003) | NM_001793 |
| SMARCD3 | Ring et al. (1998) | NM_003078 |
| PKM2 | Luftner et al. (2003) | NM_002654 |
| GPI | Tsutsumi et al. (2003) | NM_000175 |
| Pig10 | Polyak et al. (1997) | AF010413 |
| CPEB1 | Welk et al. (2001) | NM_030594 |
| HOXHB9 | Catala et al. (2002) | AI738662 |
| Truncated calcium | The Washington University-Merck | N30649 |
| binding protein | EST Project Hillier et al. (1995) | |
| SAAS | Kikuchi et al. (2003) | NM_013271 |
| HS1-2 | Edgar et al. (2002) | NM_007011 |
| HCN2 | Stieber et al. (2003) | NM_001194 |
| MBP | Kamholz et al. (1996) | M13577 |
| AD3LPAD5 | Li et al. (1995) | U34349 |
| PLOD3 | Wang et al. (2002) | NM_001084 |
| MC1R | Salazar-Onfray et al. (2002) | |
| MIF | Shimizu et al. (1999) | NM_002415 |
| HOXB7 | Care et al. (1996) | NM_004502 |
| AIM1 | Ray et al. (1997) | XM_166300 |
| EpHB6 | Hafner et al. (2003) | NM_004445 |
| AKT1 | Majumder et al. (2004) | NM_005163 |
| AKT2 | Gosmanov et al. (2004) | NM_001626 |
| AKT3 | Xu et al. (2003) | NM_005465 |
| APH-1A | Xu et al. (2003) | NM_016022 |
| APP | Masters et al. (1985) | NM_201414 |
| BACE | Pastorino et al. (2004) | NM_138973 |
| BACE2 | Pastorino et al. (2004) | NM_012104 |
| CAPN1 | Altznauer et al. (2004) | NM_005186 |
| CAPN2 | Alexa et al. (2004) | NM_001748 |
| CDK5 | Qi et al. (2004) | NM_004935 |
| CDK5R1 | Kam et al. (2004) | NM_003885 |
| CSNK1A1 | Burzio et al. (2002) | NM_001892 |
| CSNK1D | Li et al. (2004) | NM_139062 |
| CSNK1E | Swiatek et al. (2004) | NM_152221 |
| CSNK2A1 | Hilgard et al. (2004) | NM_001895 |
| CSNK2A2 | Szebeni et al. (2003) | NM_001896 |
| CSN2K2B | Lee et al. (2004) | NM_001320 |
| GSK3B | Chen et al. (2003) | NM_182946 |
| MAPK1 | Nishihara et al. (2004) | NM_138957 |
| MAPK14 | Bendotti et al. (2004) | NM_139014 |
| MAPK3 | Nishihara et al. (2004) | NM_002746 |
| MAPT | Yu et al. (2004) | NM_016841 |
| NCSTN | Shirotani et al. (2004) | NM_015331 |
| PEN2 | Marlow et al. (2003) | NM_172341 |
| PRKACA | Sakwe et al. (2004) | NM_207518 |
| PRKACB | Dwivedi et al. (2004) | NM_002731 |
| PRKACG | Zhang et al. (2004) | NM_002732 |
| PRKAR1A | Gronholm et al. (2003) | NM_212472 |
| PRKAR2A | MacDougall et al. (2003) | NM_004157 |
| PRKAR2B | Dwivedi et al. (2004) | NM_002736 |
| PRKCE | Schechtman et al. (2004) | NM_005400 |
| PSEN1 | Pitsi et al. (2004) | NM_000021 |
| PSEN2 | Zatti et al. (2004) | NM_012486 |
| PSFL | Clark et al. (2003) | NM_031301 |
| ABL1 | Gustafson et al. (2004) | NM_007313 |
| ACK1 | Ahmed et al. (2004) | NM_005781 |
| ACTN4 | Menez et al. (2004) | NM_004924 |
| ARF1 | Kadaja et al. (2004) | NM_001658 |
| ARPC1B | Kaneda et al. (2002) | |
| BCAR3 | Clark et al. (2003) | NM_003567 |
| BRAF | Sasaki et al. (2004) | NM_004333 |
| CDC42 | Chen et al. (2004) | NM_044472 |
| CRK | Stoletov et al. (2004) | NM_016823 |
| CRKL | Zhang et al. (2003) | NM_005207 |
| DDEF1 | Oda et al. (2003) | NM_018482 |
| DOCK1 | Grimsley et al. (2004) | NM_001380 |
| FYN | Lee et al. (2004) | NM_153048 |
| GIT1 | Haendeler et al. (2003) | NM_014030 |
| GRB2 | Zhou et al. (2004) | NM_203506 |
| GRF2 | Arozarena et al. (2004) | NM_006909 |
| HRAS | Nomura et al. (2004) | NM_005343 |
| JUN | Schmuth et al. (2004) | NM_002228 |
| KRAS2 | Qi et al. (2004) | NM_033360 |
| MAP2K1 | Rhee et al. (2004) | NM_002755 |
| MAP2K2 | Chen et al. (2004) | NM_030662 |
| MAP2K4 | Woo et al. (2004) | NM_003010 |
| MAP3K11 | Zhang et al. (2004a) | NM_002419 |
| MAPK8 | Fujii et al. (2004) | NM_139049 |
| MYLK | Oury et al. (2004) | NM_053032 |
| NRAS | Reifenberger et al. (2004) | NM_002524 |
| PAK1 | Sells et al. (1997) | HSU24152 |
| PAK2 | Kirchhoff et al. (2004) | NM_002577 |
| PAK3 | Kitano et al. (2003) | NM_002578 |
| PAK4 | Barac et al. (2004) | NM_005884 |
| PAK6 | Ching et al. (2003) | NM_020168 |
| PAK7 | Jaffer et al. (2002) | NM_020341 |
| PTK2 | Golubovskaya et al. (2004) | NM_005607 |
| PXN | Saito et al. (2004) | NM_002859 |
| RAC1 | Pontow et al. (2004) | NM_198829 |
| RAF1 | Akula et al. (2004) | NM_002880 |
| RAP1A | Nomura et al. (2004) | NM_002884 |
| RAP2B | Evellin et al. (2002) | NM_002886 |
| SHC1 | Yannoni et al. (2004) | NM_183001 |
| SOS1 | Buchs et al. (2004) | NM_005633 |
| SRC | Encinas et al. (2004) | NM_198291 |
| TLN1 | Tremuth et al. (2004) | NM_006289 |
| VASP | Tokuo et al. (2004) | NM_003370 |
| VCL | Izard et al. (2004) | NM_003373 |
| WASPIP | Luthi et al. (2003) | NM_003387 |
| ZYX | Li et al. (2004) | NM_003461 |

[0078] Tertiary Markers are able to replace and/or supplement primary or secondary Markers provided that the resulting assays have adequate sensitivity and specificity.

[0079] The specificity of any given amplification-based molecular diagnostic relies heavily, but not exclusively, on the identity of the primer sets. The primer sets are pairs of forward and reverse oligonucleotide primers that anneal to a target DNA sequence to permit amplification of the target sequence, thereby producing a target sequence-specific amplicon. The primers must be capable of amplifying Markers of the disease state of interest. In the case of the instant invention, these Markers are directed to melanoma.

[0080] The reaction must also contain some means of detection of a specific signal. This is preferably accomplished through the use of a reagent that detects a region of DNA sequence derived from polymerization of the target sequence of interest. Preferred reagents for detection give a measurable signal differential when bound to a specific nucleic acid sequence of interest. Often, these methods involve nucleic acid probes that give increased fluorescence when bound to the sequence of interest. Typically, the progress of the reactions of the inventive methods are monitored by analyzing the relative rates of amplicon production for each PCR primer set.

[0081] The invention further includes primer/probe sets and their use in the claimed methods. The sequences are:

SEQ ID NO:4 (PLAB forward primer)
ggcagaatcttcgtccgca
SEQ ID NO:5 (PLAB reverse primer)
ggacagtggtccccgttg
SEQ ID NO.6 (PLAB probe)
cccagctggagttgcacttgcggcc
SEQ ID NO:7 (PLAB upper primer)
gaacaccgacctcgtccc
SEQ ID NO:8 (PLAB lower primer)
ggcggcccgagagata
SEQ ID NO:9 (PLAB probe)
cgccagaagtgcggctgggattt
SEQ ID NO:10 (L1CAM forward)
gctgggactgggaacagaact
SEQ ID NO:11 (L1CAM Reverse)
ggagcagagatggcaaagaaa
SEQ ID NO:12 (L1CAM probe)
ttccccaccatctgctgt
SEQ ID NO:13 (L1CAM upper)
ccacagatgacatcagcctcaa
SEQ ID NO:14 (L1CAM lower)
ggtcacacccagctcttcctt
SEQ ID NO:15 (L1CAM probe)
tggcaagcccgaagtgcagttcctt
SEQ ID NO:16 (NTRK3 primer)
gccccggcacccttta
SEQ ID NO:17 (NTRK3 primer)
aaccctgccagtggtggat
SEQ ID NO:18 (NTRK3 probe)
cagatgggtgttttc
SEQ ID NO:19 (Tyr upper)
actcagcccagcatcattcttc
SEQ ID NO:20 (Tyr lower)
atggctgttgtactcctccaatc
SEQ ID NO:21 (Tyr probe)
cttctcctcttggcagattgtctgtagctt
SEQ ID NO:22 (PBGD upper)
ccacacacagcctactttccaa
SEQ ID NO:23 (PBGD lower)
tacccacgcgaatcactctca
SEQ ID NO:24 (PBGD probe)
aacggcaatgcggctgcaacggcggaatt

[0082] Monitoring amplicon production may be achieved by a number of detection reagents and methods, including without limitation, fluorescent primers, and fluorogenic probes and fluorescent dyes that bind double-stranded DNA. Molecular beacons, Scorpions, and other detection schemes may also be used. A common method of monitoring a PCR employs a fluorescent hydrolysis probe assay. This method exploits the 5′ nuclease activity of certain thermostable DNA polymerases (such as Taq or TfI DNA polymerases) to cleave an oligomeric probe during the PCR process.

[0083] The invention further provides amplicons obtained by PCR methods utilized in the inventive methods. These amplicons include the following:

SEQ ID NO:25 (PLAB Amplicon)
gaacaccgacctcgtcccggcccctgcagtccggatactcacgccagaag
tgcggctgggatccggcggccacctgcacctgcgtatctctcgggccgcc
SEQ ID NO:26 (L1CAM Amplicon)
ccacagatgacatcagcctcaagtgtgaggccagtggcaagcccgaagtg
cagttccgctggacgagggatggtgtccacttcaaacccaaggaagagct
gggtgtgacc
SEQ ID NO:27 (tyrosinase Amplicon)
actcagcccagcatcattcttctcctcttggcagattgtctgtagccgat
tggaggagtacaacagccat
SEQ ID NO:28 (PBGD Amplicon)
ccacacacagcctactttccaagcggagccatgtctggtaacggcaatgc
ggctgcaacggcggaagaaaacagcccaaagatgagagtgattcgcgtgg
gta

[0084] The oligomer is selected to anneal to the amplified target sequence under elongation conditions. The probe typically has a fluorescent reporter on its 5′ end and a fluorescent quencher of the reporter at the 3′ end. So long as the oligomer is intact, the fluorescent signal from the reporter is quenched. However, when the oligomer is digested during the elongation process, the fluorescent reporter is no longer in proximity to the quencher. The relative accumulation of free fluorescent reporter for a given amplicon may be compared to the accumulation of the same amplicons for a control sample and/or to that of a control gene, such as, without limitation, β-Actin or PBGD to determine the relative abundance of a given cDNA product of a given RNA in a RNA population. Products and reagents for the fluorescent hydrolysis probe assay are readily available commercially, for instance from Applied Biosystems.

[0085] Suitable detection reagents are commonly referred to as “Scorpions” and are described in U.S. Pat. Nos. 6,326,145 and 5,525,494. These reagents include one or more molecules comprising a tailed primer and an integrated signaling system. The primer has a template binding region and a tail comprising a linker and a target binding region. The target binding region in the tail hybridizes to complementary sequence in an extension product of the primer. This target specific hybridization event is coupled to a signaling system wherein hybridization leads to a detectable change. In PCR the target binding region and the tail region are advantageously arranged such that the tail region remains single stranded, i.e. uncopied. Thus the tail region is non-amplifiable in the PCR amplification products. The linker comprises a blocking moiety that prevents polymerase mediated chain extension on the primer template.

[0086] The most preferred detection reagents are TaqMan® probes (Roche Diagnostics, Branchburg, N.J.) and they are described in U.S. Pat. Nos. 5,210,015; 5,487,972; and 5,804,375. Essentially, these probes involve nucleic acid detection by virtue of the separation of a fluor-quencher combination on a probe through the 5′-3′ exonuclease activity of the polymerase used in the PCR. Any suitable fluorophore can be used for any of the Markers or controls. Such fluorophores include, without limitation, Texas Red, CaI Red, Fam, Cy3 and Cy5. In one embodiment, the following fluorophores correspond to the noted Markers: PLAB: Fam; LlCAM: Texas Red or CaI Red, tyrosinase: Cl; PBGD: Cy5.

[0087] Equipment and software also are readily available for controlling and monitoring amplicon accumulation in PCR and QRT-PCR including the Smart Cycler thermocylcer commercially available from Cepheid of Sunnyvale, Calif., and the ABI Prism 7700 Sequence Detection System, commercially available from Applied Biosystems.

[0088] In the case of gene expression assays, it is preferable to use a gene constitutively expressed in the tissue of interest. PBGD is commonly used as an internal control due to several factors: it contains no known pseudogenes in humans, it is constitutively expressed in human tissues and it is expressed at a relatively low level and therefore is less likely to cause inhibition of the amplification of target sequences of interest. Use of PBGD as a control minimizes or eliminates reporting erroneous results arising from all potential sources of false negative results.

[0089] In the commercialization of the described methods for QRT-PCR certain kits for detection of specific nucleic acids are particularly useful. In one embodiment, the kit includes reagents for amplifying and detecting Markers. Optionally, the kit includes sample preparation reagents and or articles (e.g., tubes) to extract nucleic acids from lymph node tissue. The kits may also include articles to minimize the risk of sample contamination (e.g., disposable scalpel and surface for lymph node dissection and preparation).

[0090] In a preferred kit, reagents necessary for the one-tube QRT-PCR process described above are included such as reverse transcriptase, a reverse transcriptase primer, a corresponding PCR primer set (preferably for Markers and controls), a thermostable DNA polymerase, such as Taq polymerase, and a suitable detection reagent(s), such as, without limitation, a scorpion probe, a probe for a fluorescent hydrolysis probe assay, a molecular beacon probe, a single dye primer or a fluorescent dye specific to double-stranded DNA, such as ethidium bromide. The primers are preferably in quantities that yield the high concentrations described above. Thermostable DNA polymerases are commonly and commercially available from a variety of manufacturers. Additional materials in the kit may include: suitable reaction tubes or vials, a barrier composition, typically a wax bead, optionally including magnesium; reaction mixtures (typically 1 OX) for the reverse transcriptase and the PCR stages, including necessary buffers and reagents such as dNTPs; nuclease-or RNase-free water; RNase inhibitor; control nucleic acid(s) and/or any additional buffers, compounds, co-factors, ionic constituents, proteins and enzymes, polymers, and the like that may be used in reverse transcriptase and/or PCR stages of QRT-PCR. Optionally, the kits include nucleic acid extraction reagents and materials. Instructions are also preferably included in the kits.

[0091] The following examples are provided to illustrate but not limit the claimed invention. AU references cited herein are hereby incorporated herein by reference.

### EXAMPLE 1

### Tissue Preparation

[0092] Fresh frozen malignant melanoma, benign skin nevi, normal skin, melanoma lymph node metastasis and melanoma-free lymph node samples were obtained from Genomics Collaborative, Inc. (Cambridge, Mass.), Asterand (Detroit, Mich.), Clinomics (Pittsfield, Mass.) and Proteogenex (Los Angeles, Calif.), Ardais (Lexington, Mass.) and Impath (Westborough, Mass.). All tissue vendors declared that tissue specimens used in the study were collected according to an Institutional Review Board approved protocol of corresponding hospitals and principles of bioethics. Patients' demographic and pathology information was also collected. The histopathological features of each sample were reviewed to confirm diagnosis, and to estimate sample preservation and tumor content.

[0093] Melanoma and benign nevi primary tissues chosen for microarray analysis had melanocyte content greater than 50% with no mixed histology. Melanoma positive lymph nodes were collected from malignant melanoma patients; diagnosis of melanoma was confirmed by H&E in combination with IHC (SlOO and HMB45). Melanoma free lymph nodes derived from patients that did not have melanoma in their clinical history and absence of melanoma was confirmed by H&E and IHC using antibodies for SlOO and HMB45.

[0094] RNA from a total of 70 primary tissue samples was used for gene expression profiling and melanoma specific gene identification. Samples included 45 primary malignant melanoma, 18 benign skin nevi, and 7 normal skin tissues. The majority of primary melanomas included in the study represent early stage of disease and have thickness less than 4 mm, which is consistent with the standard melanoma patient population. Aitken et al. (2004). Patient demographic, clinical and pathology characteristics are presented in Table 6 and summarized in Table 7.

[0095] In addition, 77 malignant melanoma LN metastasis and 18 melanoma-free LN tissue samples were used for one-step quantitative PCR assay. Melanoma positive lymph nodes included axillary, cervical and inguinal lymph nodes with metastasis derived from epithelioid and spindle cell primary melanomas. Out of 18 melanoma free LN, 10 were collected from other cancer patients but no cancer cells were found in these nodes by pathologists and 8 LN were from non-malignant lesions.

TABLE 6

| Sample | | | | | | T | N&M | Clark |
|---|---|---|---|---|---|---|---|---|
| ID | Age | Gender | Race | Diagnosis | Location | Stage | Stage | level |
| 430MM | n/a | F | Cau | normal skin | trunk | | | |
| 431MM | n/a | F | Cau | normal skin | trunk | | | |
| 432MM | n/a | F | Cau | normal skin | trunk | | | |
| 433MM | n/a | F | Cau | normal skin | trunk | | | |
| 435MM | n/a | F | Cau | normal skin | trunk | | | |
| 437MM | n/a | F | Cau | normal skin | trunk | | | |
| 485MM | 37 | M | Cau | normal skin | skin, NOS | | | |
| 487MM | 35 | F | Cau | atypical nevus, mild | face | | | |
| 489MM | 56 | F | Cau | compound nevus | face | | | |
| 490MM | 16 | F | Cau | compound nevus | scalp & neck | | | |
| 491MM | 15 | M | Cau | compound nevus | trunk | | | |
| 493MM | 35 | F | Cau | compound nevus | trunk | | | |
| 495MM | 18 | F | Cau | benign nevus, NOS | trunk | | | |
| 496MM | 21 | F | Cau | intradermal nevus | lower limb & hip | | | |
| 497MM | 12 | M | Cau | intradermal nevus | lower limb & hip | | | |
| 498MM | 44 | F | Cau | benign nevus, NOS | trunk | | | |
| 499MM | 48 | F | Cau | benign nevus, NOS | face | | | |
| 500MM | 65 | M | Cau | intradermal nevus | trunk | | | |
| 501MM | 30 | M | Cau | compound nevus | lower limb & hip | | | |
| 502MM | 20 | F | Cau | compound nevus | trunk | | | |
| 503MM | 35 | M | Cau | intradermal nevus | lower limb & hip | | | |
| 504MM | 23 | M | Cau | compound nevus | trunk | | | |
| 507MM | 53 | M | Cau | atypical nevus, moderate | trunk | | | |
| 508MM | 28 | M | Cau | compound nevus | trunk | | | |
| 509MM | 43 | M | Cau | intradermal nevus | trunk | | | |
| 392MM | 58 | F | Cau | epithelioid melanoma | trunk | T3 | N0M0 | 4 |
| 397MM | 51 | F | Cau | epithelioid melanoma | lower limb & hip | T2 | N0M0 | 3 |
| 405MM | 46 | M | Cau | epithelioid melanoma | upper limb & | T2 | N0M0 | 3 |
| | | | | | shoulder | | | |
| 407MM | 64 | F | Cau | epithelioid melanoma | trunk | T1 | N0M0 | 2 |
| 409MM | 54 | F | Cau | epithelioid melanoma | scalp & neck | T2 | N0M0 | 3 |
| 440MM | 61 | M | Cau | malignant melanoma, | lower limb & hip | T1 | N0M0 | 2 |
| | | | | NOS | | | | |
| 441MM | 78 | M | Cau | spindle cell melanoma | face | T4 | N0M0 | 5 |
| 442MM | 52 | M | Cau | malignant melanoma, | upper limb & | T2 | N0M0 | 3 |
| | | | | NOS | shoulder | | | |
| 443MM | 51 | F | Cau | spindle cell melanoma | trunk | T2 | N0M0 | 3 |
| 444MM | 49 | F | Cau | spindle cell melanoma | lower limb & hip | T3 | N0M0 | 4 |
| 445MM | 76 | F | Cau | malignant melanoma, | upper limb & | T3 | N0M0 | 4 |
| | | | | NOS | shoulder | | | |
| 446MM | 86 | M | Cau | malignant melanoma, | scalp & neck | T1 | N0M0 | 2 |
| | | | | NOS | | | | |
| 447MM | 48 | M | Cau | epithelioid melanoma | skin, NOS | T3 | N0M0 | 4 |
| 448MM | 72 | F | Cau | epithelioid melanoma | upper limb & | T2 | N0M0 | 3 |
| | | | | | shoulder | | | |
| 449MM | 62 | M | Asian | epithelioid melanoma | lower limb & hip | T3 | N1M0 | n/a |
| 450MM | 90 | F | Cau | epithelioid melanoma | upper limb & | T4 | N1M1 | n/a |
| | | | | | shoulder | | | |
| 452MM | 43 | M | Cau | epithelioid melanoma | skin, NOS | T3 | N0M0 | n/a |
| 453MM | 48 | F | Cau | epithelioid melanoma | trunk | T3 | N0M0 | n/a |
| 454MM | 69 | M | Cau | epithelioid melanoma | upper limb & | T3 | N0M0 | n/a |
| | | | | | shoulder | | | |
| 455MM | 55 | M | Cau | malignant melanoma, | skin, NOS | T2 | N0M0 | n/a |
| | | | | NOS | | | | |
| 456MM | 63 | M | Cau | malignant melanoma, | lower limb & hip | T2 | N0M0 | 3 |
| | | | | NOS | | | | |
| 457MM | 69 | M | Cau | spindle cell melanoma | trunk | T1 | N0M0 | 2 |
| 459MM | 86 | F | Cau | malignant melanoma, | lower limb & hip | T2 | N0M0 | 3 |
| | | | | NOS | | | | |
| 460MM | 64 | M | Cau | malignant melanoma, | upper limb & | T3 | N0M0 | 4 |
| | | | | NOS | shoulder | | | |
| 461MM | 66 | M | Cau | epithelioid melanoma | trunk | T1 | N0M0 | 2 |
| 463MM | 58 | M | Cau | malignant melanoma, | trunk | T1 | N0M0 | 2 |
| | | | | NOS | | | | |
| 464MM | 53 | M | Cau | epithelioid melanoma | face | T2 | N0M0 | 3 |
| 465MM | 77 | F | Cau | epithelioid melanoma | upper limb & | T3 | N0M0 | 4 |
| | | | | | shoulder | | | |
| 466MM | 79 | F | Cau | malignant melanoma, | upper limb & | T1 | N0M0 | 2 |
| | | | | NOS | shoulder | | | |
| 468MM | 86 | F | Cau | spindle cell melanoma | upper limb & | T2 | N0M0 | 3 |
| | | | | | shoulder | | | |
| 469MM | 43 | F | Cau | malignant melanoma, | scalp & neck | T1 | N0M0 | 2 |
| | | | | NOS | | | | |
| 470MM | 81 | M | Cau | malignant melanoma, | upper limb & | T2 | N0M0 | 3 |
| | | | | NOS | shoulder | | | |
| 472MM | 38 | F | Cau | spindle cell melanoma | upper limb & | T1 | N0M0 | 2 |
| | | | | | shoulder | | | |
| 473MM | 69 | F | Cau | malignant melanoma, | upper limb & | T1 | N0M0 | 3 |
| | | | | NOS | shoulder | | | |
| 475MM | 77 | F | Cau | malignant melanoma, | face | T3 | N0M0 | 4 |
| | | | | NOS | | | | |
| 476MM | 87 | F | Cau | spindle cell melanoma | upper limb & | T3 | N0M0 | 4 |
| | | | | | shoulder | | | |
| 477MM | 82 | M | Cau | malignant melanoma, | scalp & neck | T2 | N0M0 | 3 |
| | | | | NOS | | | | |
| 478MM | 78 | F | Cau | epithelioid melanoma | face | T3 | N0M0 | 4 |
| 480MM | 59 | M | Cau | malignant melanoma, | upper limb & | T2 | N0M0 | 3 |
| | | | | NOS | shoulder | | | |
| 481MM | 85 | M | Cau | malignant melanoma, | upper limb & | T3 | N0M0 | 4 |
| | | | | NOS | shoulder | | | |
| 482MM | 66 | M | Cau | epithelioid melanoma | face | T3 | N0M0 | 4 |
| 483MM | 85 | F | Cau | epithelioid melanoma | trunk | T4 | N0M0 | 5 |
| 484MM | 70 | F | Cau | malignant melanoma, | upper limb & | T1 | N0M0 | 3 |
| | | | | NOS | shoulder | | | |
| 511MM | 69 | M | Cau | epithelioid melanoma | skin, NOS | T3 | N1M0 | 4 |
| 512MM | 45 | M | Cau | epithelioid melanoma | trunk | T4 | N0M0 | 3 |

[0096] TABLE 7

| | | | Normal |
|---|---|---|---|
| Characteristics | Melanoma (%) | Nevi (%) | skin (%) |
| Mean Age | 65.51 ± 14.55 | 33.17 ± 15.60 | n/a |
| Gender | | | |
| Female | 22 (48.9) | 9 (50) | 6 |
| Male | 23 (51.1) | 0 (50) | 1 |
| Anatomical location | | | |
| Face | 5 (11.1) | 3 (17) | |
| Scalp and neck | 4 (8.( ) | 1 (6) | |
| Trunk | 9 (20) | 10 (55) | 6 (86) |
| Upper limb and shoulder | 17 (37.8) | | |
| Lower limb and hip | 6 (13.3) | 4 (22) | |
| Skin, NOS | 4 (8.9) | | 1 (14) |
| Histological diagnosis | | | |
| Epitheloid cell | 20 (44.4) | | |
| Spindle cell | 7 (15.6) | | |
| Malignant melanoma NOS | 18 (40) | | |
| Compound nevus | | 8 (44) | |
| Intradermal nevus | | 5 (28) | |
| Atypical nevus | | 2 (11) | |
| Benign nevus, NOS | | 3 (17) | |
| Normal skin | | | 7 (100) |
| T stage (thickness) | | | |
| T1 | 11 (24.4) | | |
| T2 | 14 (31.1) | | |
| T3 | 16 (35.6) | | |
| T4 | 4 (8.9) | | |
| N stage | | | |
| N0 | 42 (93.3) | | |
| N1 | 3 (6.7) | | |
| M stage | | | |
| M0 | 44 (97.8) | | |
| M1 | 1 (2.2) | | |
| Clark level | | | |
| 2 | 9 (20) | | |
| 3 | 16 (35/6) | | |
| 4 | 12 (26.7) | | |
| 5 | 2 (4.4) | | |
| n/a | 6 (13.3) | | |

### EXAMPLE 2

### RNA Isolation from Malignant Melanoma and Benign Skin Nevi Samples

[0097] Qiagen RNeasy™ Mini Kit (QIAGEN Inc., Valencia, Calif.) was used, with a 5 modified protocol to minimize the residual melanin in the RNA sample. For melanocyte containing tissues, four replicate tissue samples derived from individual patient each weighed approximately 5 mg and were used and processed separately. Tissue samples were homogenized in 1.0 ml RLT buffer (QIAGEN) containing 10 μl β-mercaptoethanol (Sigma Chemical Co., St. Louis, Mo.) by a mechanical homogenizer (UltraTurrex T8, IKA-Werke, Staufen, Germany). After homogenization, samples were loaded onto QIAGEN RNeasy™ columns and followed by centrifugation. After discarding the flow-through, 700 ml of RWl buffer was added; the column was kept for 5 min at room temperature and then centrifuged. This step was repeated 3 times. Then the standard QIAGEN RNeasy™ Mini Kit protocol was followed. To remove RNA from the silica gel membrane, a two-step elution was performed. The total RNA derived from the same individual patient tissue was pooled and used for further analysis.

[0098] Standard Trizol protocol was used for RNA isolation from tissues that do not contain a significant proportion of melanocytes. Tissue was homogenized in Trizol reagent (Invitrogen, Carlsbad, Calif.). After centrifugation the top liquid phase was collected and total RNA was precipitated with isopropyl alcohol at −20° C. RNA pellets were washed with 75% ethanol, resolved in water and stored at −80° C. until use. RNA quality was examined with an Agilent 2100 Bioanalyzer RNA 6000 Nano Assay (Agilent Technologies, Palo Alto, Calif.).

[0099] Labeled cRNA was prepared and hybridized with the high-density oligonucleotide array HuI 33A Gene Chip (Affymetrix, Santa Clara, Calif.) containing a total of 22,000 probe sets according to the standard manufacturer protocol. Arrays were scanned using Affymetrix protocols and scanners. For subsequent analysis, each probe set was considered as a separate gene. Expression values for each gene were calculated by using Affymetrix Gene Chip analysis software MAS 5.0. All chips met three quality control standards: “present” call was greater than 35%, scale factor was smaller than 12 when scaled to a target intensity of 600, and background level was less than 150. Lower than usual percent of “present” calls cut-off was chosen because it is difficult to isolate RNA from skin cells (Hipfel et al. (1998)) resulting in lower overall gene expression levels.

### EXAMPLE 3

### Data Analysis

[0100] Gene expression data were filtered to include only genes called “present” in 2 or more samples. This filter was used to remove genes that did not change expression in the samples. Of the 22,000 genes presented on the array, 15,795 passed this filter and were used for hierarchical clustering. Prior to clustering, each gene expression signal was divided by the median expression in al samples in the data set. This standardization step minimized the effect of the magnitude of gene expression and group together genes with similar expression patterns in the clustering analysis. Average linkage hierarchical clustering using Pearson correlation was performed on both the genes and the samples using GeneSpring 6.1.

[0101] In order to identify differentially expressed genes, we compared the melanoma samples to the benign nevi and the normal skin samples separately. The first analysis consisted of the 45 melanoma and 7 normal skin samples; the second analysis consisted of 45 melanoma and 18 nevi samples. These two datasets were analyzed separately in following procedures as shown in FIG. 1. Significance analysis of microarray (SAM; Tusher et al. (2001)) and Student T-test were used in gene selection. Parameters for SAM were set as Δ=2.5 and fold change=2.0 with 1,000 permutations. FDR was 1%. There were no missing data and the default random number was used. Next percentile analysis was conducted. For up-regulated genes the 30% ile in melanoma samples was compared to the maximum of the normal samples, or that of nevi samples. Student T-test with Bonferroni correction was also performed with cut-off p<0.05 in order to ensure that the selected genes had significant differential expression between the two groups of the samples. As a final step, we identified common genes between the melanoma/benign and melanoma/normal gene lists resulting in the single list of genes upregulated in melanoma shown in FIG. 1 where the 439 common genes correspond to SEQ ID NOs: 29-467 as described in Table 15 with the results shown in Table 8.

TABLE 8

| | Median | | |
|---|---|---|---|
| | Expression in | Fold Change | Fold Change |
| PSID | Melanoma | (Cancer vs Benign) | (Cancer vs skin) |
| 200078_s_at | 3954 | 2 | 3 |
| 200601_at | 9254 | 2 | 7 |
| 200612_s_at | 2396 | 2 | 5 |
| 200644_at | 7240 | 3 | 6 |
| 200660_at | 14659 | 3 | 4 |
| 200707_at | 3153 | 2 | 51 |
| 200736_s_at | 7305 | 3 | 3 |
| 200737_at | 2423 | 2 | 2 |
| 200783_s_at | 1028 | 2 | 2 |
| 200825_s_at | 3746 | 3 | 3 |
| 200827_at | 1593 | 2 | 2 |
| 200837_at | 5817 | 2 | 5 |
| 200838_at | 19225 | 8 | 17 |
| 200839_s_at | 28353 | 5 | 7 |
| 200859_x_at | 9665 | 3 | 7 |
| 200910_at | 7780 | 2 | 4 |
| 200950_at | 8419 | 3 | 7 |
| 200954_at | 3132 | 2 | 6 |
| 200966_x_at | 27388 | 2 | 3 |
| 200967_at | 6154 | 2 | 4 |
| 200968_s_at | 5587 | 2 | 7 |
| 200972_at | 8943 | 3 | 3 |
| 201038_s_at | 1480 | 2 | 2 |
| 201051_at | 5439 | 2 | 5 |
| 201105_at | 33285 | 4 | 5 |
| 201106_at | 7546 | 2 | 4 |
| 201188_s_at | 1730 | 2 | 8 |
| 201189_s_at | 3870 | 3 | 3 |
| 201195_s_at | 6005 | 4 | 18 |
| 201202_at | 1860 | 3 | 2 |
| 201251_at | 23965 | 5 | 11 |
| 201252_at | 901 | 2 | 3 |
| 201271_s_at | 1648 | 2 | 5 |
| 201291_s_at | 601 | 3 | 42 |
| 201313_at | 2414 | 5 | 6 |
| 201346_at | 3359 | 2 | 2 |
| 201393_s_at | 2166 | 2 | 5 |
| 201416_at | 4845 | 4 | 4 |
| 201417_at | 2905 | 2 | 4 |
| 201470_at | 18525 | 4 | 4 |
| 201474_s_at | 2471 | 5 | 22 |
| 201485_s_at | 1398 | 2 | 10 |
| 201486_at | 1105 | 2 | 3 |
| 201536_at | 2441 | 2 | 4 |
| 201614_s_at | 651 | 2 | 4 |
| 201660_at | 4713 | 7 | 3 |
| 201661_s_at | 3336 | 6 | 5 |
| 201662_s_at | 2693 | 5 | 3 |
| 201670_s_at | 3047 | 2 | 12 |
| 201714_at | 993 | 2 | 3 |
| 201765_s_at | 5475 | 4 | 5 |
| 201792_at | 3897 | 3 | 4 |
| 201804_x_at | 5609 | 3 | 3 |
| 201819_at | 2575 | 5 | 3 |
| 201850_at | 11103 | 10 | 20 |
| 201880_at | 1833 | 2 | 3 |
| 201910_at | 3854 | 4 | 4 |
| 201911_s_at | 2154 | 3 | 4 |
| 201931_at | 2578 | 3 | 2 |
| 201954_at | 25901 | 9 | 15 |
| 201976_s_at | 7697 | 2 | 6 |
| 202069_s_at | 855 | 2 | 3 |
| 202070_s_at | 2490 | 4 | 5 |
| 202111_at | 1380 | 3 | 9 |
| 202154_x_at | 10260 | 3 | 4 |
| 202185_at | 8493 | 4 | 6 |
| 202188_at | 1269 | 3 | 9 |
| 202219_at | 5630 | 3 | 7 |
| 202224_at | 2650 | 3 | 4 |
| 202225_at | 1534 | 2 | 2 |
| 202260_s_at | 7877 | 6 | 6 |
| 202295_s_at | 15129 | 6 | 4 |
| 202329_at | 3438 | 4 | 4 |
| 202367_at | 898 | 2 | 2 |
| 202370_s_at | 4669 | 3 | 2 |
| 202478_at | 7922 | 3 | 11 |
| 202503_s_at | 2424 | 3 | 5 |
| 202589_at | 3494 | 2 | 6 |
| 202603_at | 3772 | 3 | 2 |
| 202705_at | 1058 | 4 | 4 |
| 202737_s_at | 2865 | 3 | 4 |
| 202779_s_at | 3400 | 9 | 55 |
| 202785_at | 1134 | 2 | 6 |
| 202862_at | 2540 | 6 | 4 |
| 202898_at | 4736 | 4 | 63 |
| 202954_at | 1357 | 2 | 2 |
| 202958_at | 2401 | 4 | 3 |
| 202961_s_at | 19648 | 4 | 5 |
| 202986_at | 2052 | 3 | 28 |
| 203011_at | 1346 | 2 | 2 |
| 203022_at | 1068 | 2 | 2 |
| 203069_at | 560 | 15 | 13 |
| 203071_at | 958 | 19 | 3 |
| 203094_at | 968 | 2 | 2 |
| 203145_at | 513 | 2 | 2 |
| 203167_at | 2523 | 3 | 5 |
| 203217_s_at | 6416 | 3 | 5 |
| 203234_at | 725 | 3 | 3 |
| 203256_at | 7799 | 5 | 31 |
| 203262_s_at | 2482 | 2 | 2 |
| 203300_x_at | 5278 | 3 | 16 |
| 203315_at | 3273 | 2 | 2 |
| 203366_at | 847 | 2 | 2 |
| 203396_at | 3946 | 2 | 3 |
| 203452_at | 579 | 4 | 12 |
| 203456_at | 1132 | 2 | 3 |
| 203502_at | 657 | 3 | 3 |
| 203518_at | 2943 | 3 | 7 |
| 203554_x_at | 5056 | 3 | 4 |
| 203557_s_at | 839 | 2 | 2 |
| 203570_at | 2553 | 4 | 15 |
| 203590_at | 3093 | 3 | 7 |
| 203643_at | 1380 | 3 | 8 |
| 203663_s_at | 9720 | 5 | 3 |
| 203668_at | 1963 | 2 | 3 |
| 203693_s_at | 588 | 3 | 3 |
| 203695_s_at | 1548 | 6 | 3 |
| 203723_at | 4087 | 5 | 9 |
| 203729_at | 9154 | 2 | 14 |
| 203730_s_at | 517 | 3 | 3 |
| 203731_s_at | 691 | 3 | 2 |
| 203775_at | 1251 | 4 | 3 |
| 203827_at | 3380 | 11 | 8 |
| 203878_s_at | 2036 | 8 | 5 |
| 204014_at | 7184 | 10 | 46 |
| 204015_s_at | 2207 | 5 | 15 |
| 204033_at | 2154 | 7 | 7 |
| 204092_s_at | 664 | 3 | 3 |
| 204099_at | 2496 | 6 | 6 |
| 204170_s_at | 1362 | 3 | 4 |
| 204197_s_at | 2889 | 3 | 4 |
| 204198_s_at | 4024 | 3 | 3 |
| 204202_at | 875 | 3 | 3 |
| 204228_at | 1299 | 2 | 3 |
| 204244_s_at | 538 | 4 | 4 |
| 204247_s_at | 689 | 3 | 27 |
| 204252_at | 5294 | 5 | 7 |
| 204262_s_at | 1003 | 4 | 5 |
| 204423_at | 689 | 4 | 3 |
| 204436_at | 3113 | 3 | 3 |
| 204458_at | 908 | 3 | 3 |
| 204467_s_at | 1910 | 3 | 6 |
| 204584_at | 9677 | 21 | 15 |
| 204585_s_at | 805 | 13 | 17 |
| 204647_at | 1693 | 3 | 3 |
| 204654_s_at | 3894 | 4 | 25 |
| 204709_s_at | 312 | 24 | 16 |
| 204778_x_at | 537 | 2 | 4 |
| 204779_s_at | 1641 | 4 | 4 |
| 204857_at | 2736 | 3 | 297 |
| 204932_at | 241 | 3 | 3 |
| 204973_at | 1478 | 3 | 7 |
| 204995_at | 496 | 4 | 6 |
| 205051_s_at | 3875 | 4 | 3 |
| 205142_x_at | 937 | 2 | 3 |
| 205169_at | 267 | 2 | 7 |
| 205373_at | 579 | 10 | 8 |
| 205376_at | 815 | 2 | 3 |
| 205405_at | 2302 | 4 | 11 |
| 205447_s_at | 567 | 13 | 5 |
| 205458_at | 3288 | 6 | 8 |
| 205566_at | 2684 | 7 | 8 |
| 205591_at | 1190 | 5 | 3 |
| 205681_at | 1316 | 8 | 12 |
| 205690_s_at | 9179 | 8 | 9 |
| 205691_at | 226 | 7 | 5 |
| 205717_x_at | 8127 | 3 | 3 |
| 205813_s_at | 430 | 11 | 9 |
| 205937_at | 301 | 7 | 5 |
| 205945_at | 772 | 2 | 4 |
| 205996_s_at | 909 | 2 | 3 |
| 206128_at | 364 | 3 | 3 |
| 206307_s_at | 534 | 8 | 4 |
| 206332_s_at | 4671 | 2 | 2 |
| 206397_x_at | 1436 | 6 | 43 |
| 206441_s_at | 3681 | 6 | 31 |
| 206462_s_at | 9953 | 53 | 24 |
| 206503_x_at | 419 | 8 | 9 |
| 206617_s_at | 898 | 4 | 19 |
| 206630_at | 23194 | 3 | 46 |
| 206688_s_at | 2989 | 3 | 2 |
| 206696_at | 6446 | 7 | 191 |
| 206777_s_at | 683 | 4 | 7 |
| 206864_s_at | 421 | 5 | 5 |
| 206976_s_at | 3375 | 4 | 3 |
| 207038_at | 1986 | 9 | 47 |
| 207060_at | 497 | 4 | 5 |
| 207144_s_at | 593 | 17 | 24 |
| 207163_s_at | 3217 | 3 | 10 |
| 207183_at | 230 | 6 | 6 |
| 207592_s_at | 350 | 5 | 14 |
| 207614_s_at | 2139 | 2 | 6 |
| 207622_s_at | 882 | 2 | 16 |
| 207828_s_at | 997 | 3 | 3 |
| 208002_s_at | 3142 | 3 | 7 |
| 208089_s_at | 1374 | 3 | 6 |
| 208308_s_at | 12282 | 4 | 9 |
| 208540_x_at | 5257 | 2 | 2 |
| 208644_at | 2242 | 2 | 3 |
| 208657_s_at | 1547 | 2 | 4 |
| 208677_s_at | 5414 | 3 | 14 |
| 208696_at | 7351 | 4 | 3 |
| 208710_s_at | 1112 | 3 | 44 |
| 208723_at | 4402 | 3 | 6 |
| 208744_x_at | 1673 | 4 | 49 |
| 208837_at | 3997 | 2 | 3 |
| 208916_at | 1630 | 3 | 5 |
| 208928_at | 1439 | 4 | 7 |
| 208956_x_at | 7772 | 3 | 2 |
| 208974_x_at | 6025 | 2 | 6 |
| 208975_s_at | 1085 | 2 | 3 |
| 209015_s_at | 1739 | 4 | 4 |
| 209036_s_at | 8944 | 3 | 3 |
| 209053_s_at | 269 | 7 | 10 |
| 209072_at | 6299 | 4 | 18 |
| 209079_x_at | 12870 | 3 | 3 |
| 209081_s_at | 3160 | 3 | 2 |
| 209123_at | 4686 | 4 | 3 |
| 209132_s_at | 4385 | 5 | 12 |
| 209172_s_at | 268 | 3 | 3 |
| 209197_at | 820 | 3 | 3 |
| 209198_s_at | 491 | 3 | 3 |
| 209247_s_at | 1486 | 2 | 2 |
| 209254_at | 1384 | 4 | 7 |
| 209255_at | 4283 | 6 | 8 |
| 209256_s_at | 4949 | 8 | 6 |
| 209283_at | 12529 | 5 | 3 |
| 209345_s_at | 1678 | 2 | 2 |
| 209407_s_at | 1461 | 2 | 6 |
| 209515_s_at | 5827 | 5 | 15 |
| 209773_s_at | 1243 | 3 | 5 |
| 209825_s_at | 765 | 2 | 3 |
| 209827_s_at | 4884 | 7 | 7 |
| 209828_s_at | 1146 | 4 | 5 |
| 209848_s_at | 32959 | 7 | 74 |
| 209875_s_at | 3038 | 21 | 12 |
| 209932_s_at | 7126 | 3 | 5 |
| 210052_s_at | 1085 | 3 | 6 |
| 210073_at | 337 | 4 | 6 |
| 210111_s_at | 7841 | 5 | 3 |
| 210127_at | 391 | 2 | 9 |
| 210854_x_at | 2100 | 2 | 6 |
| 210926_at | 574 | 2 | 3 |
| 210948_s_at | 396 | 2 | 4 |
| 210951_x_at | 2501 | 2 | 13 |
| 211013_x_at | 498 | 8 | 13 |
| 211052_s_at | 1399 | 3 | 2 |
| 211066_x_at | 12431 | 2 | 2 |
| 211373_s_at | 2063 | 5 | 6 |
| 211564_s_at | 1992 | 3 | 2 |
| 211752_s_at | 2183 | 2 | 2 |
| 211759_x_at | 5674 | 2 | 3 |
| 211833_s_at | 502 | 2 | 28 |
| 212000_at | 339 | 3 | 14 |
| 212070_at | 13437 | 2 | 4 |
| 212081_x_at | 1457 | 2 | 4 |
| 212119_at | 4415 | 2 | 5 |
| 212178_s_at | 2976 | 3 | 14 |
| 212193_s_at | 3646 | 3 | 10 |
| 212247_at | 1716 | 3 | 3 |
| 212285_s_at | 4252 | 2 | 4 |
| 212312_at | 1234 | 4 | 2 |
| 212338_at | 1598 | 3 | 4 |
| 212402_at | 3019 | 3 | 4 |
| 212472_at | 1987 | 5 | 5 |
| 212473_s_at | 3747 | 5 | 4 |
| 212512_s_at | 1441 | 3 | 2 |
| 212520_s_at | 2188 | 2 | 4 |
| 212552_at | 2611 | 2 | 2 |
| 212715_s_at | 1085 | 3 | 4 |
| 212739_s_at | 2736 | 2 | 3 |
| 212744_at | 959 | 3 | 5 |
| 212745_s_at | 376 | 2 | 15 |
| 212793_at | 3123 | 4 | 5 |
| 212796_s_at | 2511 | 2 | 2 |
| 213002_at | 1439 | 2 | 3 |
| 213007_at | 968 | 3 | 4 |
| 213008_at | 1086 | 6 | 10 |
| 213096_at | 924 | 3 | 3 |
| 213131_at | 1392 | 3 | 3 |
| 213169_at | 4028 | 5 | 4 |
| 213215_at | 1926 | 4 | 3 |
| 213217_at | 5848 | 10 | 6 |
| 213241_at | 9479 | 4 | 23 |
| 213274_s_at | 18263 | 12 | 26 |
| 213275_x_at | 17604 | 7 | 3 |
| 213330_s_at | 1233 | 2 | 7 |
| 213333_at | 1845 | 2 | 3 |
| 213338_at | 932 | 6 | 4 |
| 213392_at | 1022 | 2 | 2 |
| 213474_at | 723 | 2 | 3 |
| 213496_at | 2322 | 3 | 7 |
| 213573_at | 1643 | 2 | 3 |
| 213587_s_at | 10416 | 18 | 9 |
| 213638_at | 1827 | 26 | 102 |
| 213670_x_at | 1959 | 2 | 4 |
| 213720_s_at | 2248 | 2 | 3 |
| 213746_s_at | 4187 | 3 | 14 |
| 213836_s_at | 2605 | 8 | 5 |
| 213895_at | 1279 | 3 | 4 |
| 213960_at | 11768 | 80 | 29 |
| 214023_x_at | 1602 | 7 | 9 |
| 214068_at | 2148 | 9 | 10 |
| 214104_at | 814 | 2 | 3 |
| 214201_x_at | 746 | 2 | 3 |
| 214581_x_at | 510 | 5 | 6 |
| 214614_at | 542 | 10 | 9 |
| 214632_at | 358 | 2 | 2 |
| 214656_x_at | 2977 | 2 | 2 |
| 214687_x_at | 26310 | 2 | 3 |
| 214708_at | 249 | 2 | 3 |
| 214710_s_at | 575 | 2 | 3 |
| 214714_at | 2366 | 4 | 9 |
| 214717_at | 471 | 4 | 4 |
| 214752_x_at | 6462 | 3 | 4 |
| 214778_at | 311 | 3 | 27 |
| 214841_at | 913 | 9 | 11 |
| 214893_x_at | 214 | 10 | 9 |
| 214896_at | 3071 | 8 | 11 |
| 215025_at | 2365 | 149 | 93 |
| 215115_x_at | 12421 | 34 | 15 |
| 215126_at | 4940 | 8 | 19 |
| 215155_at | 505 | 6 | 4 |
| 215311_at | 10093 | 86 | 30 |
| 215812_s_at | 1176 | 3 | 13 |
| 215836_s_at | 9406 | 3 | 3 |
| 216194_s_at | 5011 | 3 | 3 |
| 216973_s_at | 1732 | 6 | 4 |
| 217033_x_at | 10961 | 21 | 19 |
| 217104_at | 317 | 6 | 3 |
| 217226_s_at | 2191 | 3 | 3 |
| 217297_s_at | 838 | 3 | 21 |
| 217377_x_at | 12402 | 27 | 18 |
| 217419_x_at | 2742 | 3 | 5 |
| 217624_at | 349 | 21 | 20 |
| 217799_x_at | 1724 | 2 | 11 |
| 217827_s_at | 4762 | 2 | 2 |
| 217867_x_at | 9024 | 3 | 9 |
| 217871_s_at | 19519 | 3 | 11 |
| 217891_at | 1271 | 2 | 3 |
| 218009_s_at | 1557 | 4 | 3 |
| 218030_at | 1316 | 2 | 3 |
| 218074_at | 3594 | 2 | 4 |
| 218143_s_at | 4007 | 3 | 5 |
| 218151_x_at | 1384 | 2 | 2 |
| 218152_at | 1440 | 2 | 3 |
| 218161_s_at | 941 | 5 | 5 |
| 218175_at | 3563 | 3 | 2 |
| 218330_s_at | 3853 | 7 | 4 |
| 218349_s_at | 588 | 3 | 14 |
| 218359_at | 796 | 3 | 5 |
| 218376_s_at | 1931 | 4 | 4 |
| 218447_at | 2209 | 2 | 3 |
| 218542_at | 409 | 3 | 6 |
| 218564_at | 433 | 2 | 4 |
| 218608_at | 627 | 3 | 4 |
| 218678_at | 11356 | 14 | 20 |
| 218774_at | 1061 | 2 | 5 |
| 218786_at | 732 | 3 | 2 |
| 218824_at | 1351 | 3 | 5 |
| 218839_at | 1996 | 38 | 7 |
| 218856_at | 3199 | 5 | 4 |
| 218888_s_at | 906 | 6 | 5 |
| 218931_at | 911 | 3 | 2 |
| 218952_at | 2661 | 7 | 7 |
| 218956_s_at | 1840 | 4 | 3 |
| 218980_at | 1627 | 3 | 8 |
| 218996_at | 1859 | 4 | 6 |
| 219011_at | 113 | 4 | 3 |
| 219039_at | 1852 | 2 | 5 |
| 219040_at | 480 | 3 | 10 |
| 219041_s_at | 3435 | 4 | 2 |
| 219051_x_at | 1127 | 3 | 8 |
| 219066_at | 621 | 4 | 2 |
| 219143_s_at | 3618 | 9 | 13 |
| 219148_at | 426 | 2 | 3 |
| 219152_at | 365 | 13 | 10 |
| 219219_at | 859 | 2 | 3 |
| 219361_s_at | 1033 | 3 | 7 |
| 219372_at | 376 | 2 | 2 |
| 219408_at | 421 | 3 | 36 |
| 219478_at | 5485 | 80 | 18 |
| 219491_at | 547 | 3 | 12 |
| 219522_at | 822 | 4 | 3 |
| 219537_x_at | 411 | 3 | 6 |
| 219555_s_at | 402 | 12 | 21 |
| 219578_s_at | 1419 | 17 | 26 |
| 219634_at | 686 | 3 | 15 |
| 219637_at | 355 | 3 | 3 |
| 219703_at | 378 | 3 | 3 |
| 219742_at | 409 | 3 | 9 |
| 219895_at | 528 | 6 | 3 |
| 219933_at | 1399 | 2 | 2 |
| 220116_at | 748 | 5 | 8 |
| 220155_s_at | 5010 | 5 | 6 |
| 220178_at | 5915 | 9 | 15 |
| 220454_s_at | 581 | 2 | 2 |
| 220864_s_at | 8416 | 3 | 3 |
| 220948_s_at | 11794 | 2 | 3 |
| 220973_s_at | 497 | 4 | 3 |
| 220974_x_at | 2540 | 2 | 2 |
| 220980_s_at | 3598 | 3 | 2 |
| 221059_s_at | 2438 | 5 | 3 |
| 221483_s_at | 9194 | 3 | 3 |
| 221484_at | 3834 | 3 | 3 |
| 221538_s_at | 3971 | 3 | 3 |
| 221558_s_at | 2356 | 3 | 5 |
| 221577_x_at | 4897 | 28 | 38 |
| 221641_s_at | 1199 | 2 | 4 |
| 221688_s_at | 3740 | 2 | 4 |
| 221710_x_at | 728 | 2 | 2 |
| 221732_at | 931 | 3 | 2 |
| 221759_at | 1261 | 4 | 21 |
| 221797_at | 430 | 2 | 7 |
| 221799_at | 1601 | 5 | 3 |
| 221815_at | 3293 | 17 | 144 |
| 221882_s_at | 1144 | 5 | 6 |
| 221902_at | 2491 | 4 | 4 |
| 221909_at | 243 | 22 | 17 |
| 221962_s_at | 1132 | 2 | 6 |
| 222116_s_at | 4208 | 2 | 4 |
| 222153_at | 445 | 3 | 8 |
| 222155_s_at | 1264 | 3 | 10 |
| 222175_s_at | 2415 | 3 | 6 |
| 222196_at | 224 | 3 | 6 |
| 222199_s_at | 2152 | 2 | 3 |
| 222206_s_at | 383 | 4 | 12 |
| 222212_s_at | 3715 | 3 | 4 |
| 222231_s_at | 2724 | 3 | 2 |
| 222234_s_at | 754 | 4 | 12 |
| 222240_s_at | 1331 | 3 | 3 |
| 222294_s_at | 2193 | 3 | 5 |
| 32811_at | 4194 | 2 | 3 |
| 40560_at | 1629 | 3 | 5 |
| 44783_s_at | 8503 | 14 | 6 |
| 46665_at | 7835 | 4 | 3 |
| 55093_at | 3032 | 4 | 4 |
| 63825_at | 10096 | 14 | 74 |
| 87100_at | 737 | 6 | 70 |

[0102] We selected a short list of genes with at least 10-fold over-expression in melanoma as compared to the benign specimens. The complete array dataset has been submitted to the NCBI/Genbank GEO database (series entry pending).

[0103] Hierarchical clustering revealed four distinct clusters (FIG. 2). Two clusters consisted of majority of the melanoma samples (43 out of 45); the third cluster included the majority of benign nevi samples (15 out of 18) and the fourth contained all 7 normal skin specimens. Melanoma samples themselves formed two clusters with 35 samples in one cluster and 10 samples in the other. Samples that formed the small cluster represented epithelioid melanoma only, visually contained less melanin and demonstrated higher expression of PRAME and MIA genes (p<0.05). The few stage III and IV tumors were all grouped in the small cluster. The large cluster showed higher expression of NTRK3 and nestin (NES) (p<0.05). All melanoma and benign nevi samples demonstrated equally high expression of known melanocyte markers such as tyrosinase and MART-I, confirming that there is comparable melanocyte content in these samples. Our data indicate that melanoma, benign nevi and normal skin samples have distinct gene expression profiles and can be separated on molecular basis. Selected genes that were highly expressed in melanoma and their associated functional categories are summarized in Table 9.

TABLE 9

| | | | | |
|---|---|---|---|---|
| | | Median | Median | |
| | | expression in | expression in | Fold |
| psid | Name | melanoma | benign/normal | change |

Neural system development and function

| | | | | |
|---|---|---|---|---|
| 215025_at | NTRK3 | 2365.1 | 19.9 | 118.8 |
| 204709_s_at | KNSL5 | 311.8 | 13.5 | 23.1 |
| 204585_s_at | L1CAM var 1 | 805.2 | 49 | 16.4 |
| 218678_at | NES | 11355.5 | 703.6 | 16.1 |
| 202260_s_at | STXBP1 | 7877.1 | 1312 | 6.0 |
| 204995_at | p35 | 496.3 | 89.2 | 5.6 |
| 208308_s_at | GP1 | 12281.7 | 2238.2 | 5.5 |
| 201340_s_at | ENC1 | 390.8 | 74.9 | 5.2 |
| 209072_at | MBP | 6299.1 | 1215.9 | 5.2 |

Cell movements

| | | | | |
|---|---|---|---|---|
| 214614_at | HOXB9 | 541.6 | 54.4 | 10.0 |
| 205447_s_at | MAP3K12 | 566.5 | 76.5 | 7.4 |

Tissue morphology

| | | | | |
|---|---|---|---|---|
| 206397_x_at | GDF1 | 1436.1 | 130.1 | 11.0 |
| 205458_at | MC1R | 3287.6 | 458.1 | 7.2 |

Cancer cell invasion

| | | | | |
|---|---|---|---|---|
| 213274_s_at | CSTTB | 18262.9 | 1261.4 | 14.5 |
| 208677_s_at | BSG | 5413.8 | 1088 | 5.0 |

Cell cycle control

| | | | | |
|---|---|---|---|---|
| 219578_s_at | CPEB1 | 1418.5 | 75.6 | 18.8 |
| 207144_s_at | CITED1 | 593.4 | 33.5 | 17.7 |
| 204252_at | CDK2 | 5293.7 | 869.3 | 6.1 |
| 211373_s_at | PSEN2 | 2063.3 | 403.2 | 5.1 |

Cell death

| | | | | |
|---|---|---|---|---|
| 221577_x_at | PLAB | 4896.9 | 173.9 | 28.2 |
| 205681_at | BCL2A1 | 1316.4 | 135.1 | 9.7 |

Unknown

| | | | | |
|---|---|---|---|---|
| 204545_at | PEX6 | 379.1 | 23.9 | 15.9 |
| 201850_at | CAPG | 11103.2 | 725.6 | 15.3 |
| 204014_at | DUSP4 | 7183.6 | 601.3 | 11.9 |
| 202779_s_at | E2-EPF | 3400 | 323.3 | 10.5 |
| 201954_at | ARPC1B | 25900.7 | 2470 | 10.5 |
| 209848_s_at | me20m | 32958.9 | 3778.4 | 8.7 |
| 213112_s_at | SQSTM1 | 260.4 | 33.9 | 7.7 |
| 218952_at | SAAS | 2660.7 | 368.7 | 7.2 |
| 204099_at | SMARCD3 | 2496.2 | 428.2 | 5.8 |
| 206999_at | IL12RB2 | 354 | 61.3 | 5.8 |
| 201251_at | PKM2 | 23964.7 | 4228.2 | 5.7 |
| 202185_at | PLOD3 | 8493.2 | 1541.7 | 5.5 |

### EXAMPLE 4

### Identification of Genes Differentially Expressed in Melanoma

[0104] A total of 70 gene expression profiles were used for analysis. The he median percentages of “present calls” for melanoma, benign and normal sample groups were 43.8%, 46.9% and 41.7%. Sixty microarrays (86%) had scaling factors within 3-fold range of the minimum value. Ten chips with the scaling factors more than 3 were equally distributed between the sample categories, melanoma, benign and normal.

[0105] Unsupervised hierarchical clustering result revealed a distinct separation of the melanoma, benign nevi and normal skin samples (FIG. 2). We observed four clusters, including two clusters consisting of majority of the melanoma samples (43 out of 45), the third cluster contained all 7 normal skin, 3 benign nevi and 2 melanoma specimens and the fourth cluster, that included 14 of the 18 benign nevi samples. Source of the samples did not affect clustering. Specimens originated from different sources were clustered together according the sample type (melanoma, benign or normal). To further test the stability of the clustering patterns, we used an alternative cut-off on gene filtering prior to the cluster analysis. Specifically, we retained genes that have at least 10% “present” calls in each of the melanoma, benign nevi and skin samples. With this cut-off, we obtained 15, 306 genes and repeated hierarchical clustering. The cluster pattern on the patient samples was the same as the one from the 15,795 from the 2 “present” calls, confirming clustering stability.

[0106] The single nevi sample that clustered with the melanoma samples is an atypical nevi (moderate degree) sample with no melanoma in-situ present. All three nevi samples that clustered with normal skin are compound nevi samples and one of them has melanocyte content lower than the other nevi specimens. The melanoma samples themselves formed two clusters with 34 samples in the large and 9 samples in the smaller cluster. Samples that formed the small cluster represented epithelioid melanoma only and visually contained less melanin. The few stage III and IV tumors, used in our study, were all grouped in the small cluster. The large cluster was composed from epithelioid, spindle cell and melanoma of mixed histology specimens with more significant presence of melanin. The large cluster included Stage I and Stage II specimens only.

[0107] Distinct gene clusters were found in association to melanoma. This can be characterized by up-regulated (FIG. 2, A, B, C) and down-regulated (FIG. 2, E) genes in the melanoma samples. At the same time, melanoma and benign nevi samples demonstrated high expression of known melanocyte markers, such as MART-I (FIG. 3, D) confirming a comparable content of melanocyte in these samples and inability of melanocyte specific markers to differentiate them. Our data indicate that melanoma, benign nevi and normal skin samples have distinct gene expression profiles and can be separated on their molecular basis.

[0108] In order to identify genes upregulated in malignant melanoma, we applied SAM in combination with t-test with Bonferroni correction and percentile analysis (FIG. 1). Bonferroni-adjusted t-test and percentile analyses were used to address the multiple testing issue and the heterogeneity of the tumor samples, respectively. As the result of these analyses, 439 genes were selected and are summarized in Table 15 as SEQ ID NOs: 29-467. Out of 439 genes up-regulated in melanoma, we selected a short list of 33 genes that had more than 10-fold over-expression in the melanoma samples than that of the benign specimens. These include many genes with known association with malignant melanoma such as NTRK3 (Xu et al. (2003)), LlCAM (Fogel et al. (2003); and Thies et al. (2002)), me20m (Adema et al. (1994)), as well as novel genes. Genes with more than 10-fold overexpression in melanoma are presented in Table 10.

TABLE 10

| | | Median | Fold change | |
|---|---|---|---|---|
| | | Exp | (Can v | Fold change |
| Psid | Description | Melanoma | Benign) | (Can v skin) |
| 215025_at | NTRK3 | 2365 | 149 | 93 |
| 215311_at | EUROIMAGE | 10093 | 86 | 30 |
| | 21920 | | | |
| 213960_at | EUROIMAGE | 11768 | 80 | 29 |
| | 51358 | | | |
| 219478_at | WFDC1 | 5485 | 80 | 18 |
| 218839_at | HEY1 | 1996 | 38 | 7 |
| 215115_x_at | TEL oncogene | 12421 | 34 | 15 |
| 221577_x_at | PLAB | 4897 | 28 | 38 |
| 217377_x_at | ETV6-NTRK3 | 12402 | 27 | 18 |
| | fusion | | | |
| 213638_at | PHACTR1 | 1827 | 26 | 102 |
| 204709_s_at | KNSL5 | 312 | 24 | 16 |
| 221909_at | Hyp protein | 243 | 22 | 17 |
| | FLJ14627 | | | |
| 204584_at | L1CAM | 9677 | 21 | 15 |
| 209875_s_at | SPP1 | 3038 | 21 | 12 |
| 217624_at | PDAP1 | 349 | 21 | 20 |
| 203071_at | SEMA3B | 958 | 19 | 3 |
| 213587_s_at | C7ORF32 | 10416 | 18 | 9 |
| 221815_at | ABHD2 | 3293 | 17 | 144 |
| 219578_s_at | CPEB1 | 1419 | 17 | 26 |
| 207144_s_at | CITED1 | 593 | 17 | 24 |
| 203069_at | SV2A | 560 | 15 | 13 |
| 218678_at | NES | 11356 | 14 | 20 |
| 219152_at | PODXL2 | 365 | 13 | 10 |
| 205447_s_at | MAP3L12 | 567 | 13 | 5 |
| 213274_s_at | CTSB | 18263 | 12 | 26 |
| 219555_s-at | BMO39 | 402 | 12 | 21 |
| 203827_at | WIPI49 | 3380 | 11 | 8 |
| 205813_s_at | MAT1A | 430 | 11 | 9 |
| 201850_at | CAPG | 11103 | 10 | 20 |
| 205373_at | CTNNA2 | 579 | 10 | 8 |
| 214614_at | HLXB9 | 542 | 10 | 9 |
| 213217 | ADCY2 | 5848 | 10 | 6 |
| 204014_at | DUSP4 | 7184 | 10 | 46 |
| 214893 | HCN2 | 214 | 10 | 9 |

[0109] We further selected three genes over-expressed in melanoma, including NTRK3, PLAB, LlCAM, for quantitative real-time RT-PCR validation of the microarray results (FIG. 3). PLAB is a novel gene, whose differential expression in melanoma was not reported before at our best knowledge. For LlCAM and NTRK3, differential expression in melanoma was demonstrated at protein level only. Xu et al. (2003); Fogel et al. (2003); and Thies et al. (2002). Moreover, we identified PLAB and LlCAM as the best combination, on complementary basis, to separate melanoma from benign/normal tissues in our study. GPlOO is known as a melanoma specific marker and was selected as positive control. For the RT-PCR assay we used a panel of 14 primary melanoma, 7 benign nevi and 5 normal skin samples, isolated from the same tissues as used for the microarray study. The expression value of each gene was normalized to the housekeeping control gene PBGD. The correlation coefficients between the RT-PCR and the microarray results for LlCAM, NTRK3, PLAB and gplOO are 0.79, 0.86, 0.87 and 0.88, respectively. This result indicates that the RT-PCR results are highly consistent with the microarray data.

### EXAMPLE 5

### Pathway Analysis of Differentially Expressed Genes

[0110] Functional analysis of genes differentially expressed in melanoma was performed using Ingenuity™ Pathway Analysis Software Application (Ingenuity, Mountain View, Calif.). Functional categories or canonical pathways that have p-value of less than 0.05 were selected. Specificity of canonical pathways identification was tested using randomly selected genes.

[0111] In order to gain further insight into a potential mechanism that differentiates melanoma from benign and normal tissue, we used Ingenuity pathway analysis software to identify canonical pathways associated with melanoma. The results analysis revealed that many of the genes in amyloid processing were up-regulated in the melanoma samples. To verify specificity of our observation, we selected three random lists of genes from Affymetrix HuI 33A microarray and subjected them to Ingenuity pathway analysis. None of these lists produced a significant association to amyloid processing or any other canonical pathways. To confirm the activation of this canonical pathway in melanoma, gene expression data for all the genes in the pathway were retrieved. Fold-change and p-value of differential expression between melanoma and benign/normal tissues were calculated. Out of the 34 genes included in the amyloid processing pathway (Esler et al. (2001); and Giancotti et al. (1999)), 25 demonstrated up-regulation trend and for 19 of them (56%), differential expression was statistically significant (p-value<0.05; FIG. 4). As the additional control, we randomly selected two metabolic pathways with a similar number of genes. Out of the 63 genes in alanine synthesis pathway, 8 of them (13%) showed significant up-regulation with p-value less than 0.05. Out of the 47 genes in histidine synthesis pathway, only 2 genes (4%) were found using the same criteria. For the first time, our data strongly indicated that activation of the amyloid processing pathway is involved in malignant melanoma.

### EXAMPLE 6

### RT-PCR Validation of Microarray Results

[0112] Ten microgram total RNA from each sample was treated with DNase I and reverse-transcribed with oligo (dT) primer using Superscript II reverse transcriptase according to the manufacturer's instructions (Invitrogen, Carlsbad, Calif.). A control gene PBGD was previously tested and reported as a housekeeping gene. Vandesompele et al. (2003). Primers and MGB-probes for me20m (gplOO), LlCAM, NTRK3, and the control gene PBGD were designed using Primer Express software (Applied Biosystems, Foster City, Calif.). The PLAB (MICl) gene probe was FAM-TAMRA based since sequences were inadequate to design MGB based probes. Primer/probe sequences were as follows:

TABLE 11

| | | |
|---|---|---|
| | | SEQ |
| | | ID |
| Description | Sequence | NO: |

| | | |
|---|---|---|
| me20m forward | TGTGTCTCTGGCTGATACCAACA | 983 |
| me20m reverse | TTCTTGACCAGGCATGATAAGCT | 984 |
| me20m probe | (6-FAM) CTGGCAGTGGTCAGC | 985 |
| L1CAM forward | GCTGGGACTGGGAACAGAACT | 10 |
| L1CAM reverse | GGAGCAGAGATGGCAAAGAAA | 11 |
| LICAM probe | (6-FAM) TCCCCACCATCTGCTGT | 12 |
| NTRK3 forward | GCCCCGGCACCCTTTA | 16 |
| NTRK3 reverse | AACCCTGCCAGTGGTGGAT | 17 |
| NTRK3 probe | (6-FAM) CAGATGGGTGTTTTC | 18 |
| PLAB forward | GGCAGAATCTTCGTCCGCA | 4 |
| PLAB reverse | GGACAGTGGTCCCCGTTG | 5 |
| PLAB probe | (6-FAM) CCCAGCTGGAGTTGCACTTGCGGCC(TAMRA) | 6 |
| PBGD forward | CTGCTTCGCTGCATCGCTGAAA | 986 |
| PBGD reverse | CAGACTCCTCCAGTCAGGTACA | 987 |
| PBGD probe | (6-FAM) CCTGAGGCACCTGGAAGGAGGCTGCAGTGT(TAMRA) | 988 |

[0113] All primers and probes were tested for optimal amplification efficiency above 90%. The standard curve was composed of six 10-fold dilutions of target gene PCR product with copy numbers ranging from 10 to 10⁶. RT-PCR amplification was carried out in a 20 μl reaction mix containing 50 ng template cDNA, 2× TaqMan® universal PCR master mix (12.5 μl) (Applied Biosystems, Foster City, Calif.), 50 OnM forward and reverse primers, and 25 OnM probe. Reactions were run on an ABI PRISM 7900HT Sequence Detection System (Applied Biosystems, Foster City, Calif.). The cycling conditions were: 2 min of AmpErase UNG activation at 50° C., 10 min of polymerase activation at 95° C. and 50 cycles at 95° C. for 15 sec and annealing temperature (60° C.) for 60 sec. In each assay, a standard curve and a no-template control along with template cDNA were included in duplicate for both the gene of interest and the control gene. The relative quantity of each target gene was represented as ΔCt, which is equal to Ct of the target gene subtracted by Ct of the control gene.

[0114] To confirm the melanoma specific genes identified by the microarray analysis, four genes (LlCAM, NTRK3, PLAB and gplOO) were selected for quantitative real-time RT-PCR validation (FIG. 4). The expression value of each gene was normalized to housekeeping control PBGD. The correlation coefficient between the RT-PCR and the microarray results for LlCAM, NTRK3, PLAB and gplOO are 0.79, 0.86, 0.87 and 0.88, respectively, indicating that the RT-PCR results are highly consistent with the microarray data.

### EXAMPLE 7

### One-Step qRTPCR Assays Using RNA-Specific Primers and Cutoff Establishment

[0115] Evaluation of expression of selected genes was carried out with one-step RT-PCR with RNA from primary melanoma, benign nevi, normal skin, melanoma IN metastasis and melanoma-free lymph nodes. Beta-actin was used as a housekeeping gene to control for the input quantity and quality of RNA in the reactions. DNase treatment was not used. Instead, primers or probes were designed to span an intron so they would not report on genomic DNA. Eight ng of total RNA was used for the RT-PCR. The Total RNA was reverse transcribed using 40× Multiscribe and RNase inhibitor mix contained in the TaqMan® One Step PCR Master Mix Reagents Kit (Applied Biosystems, Foster City, Calif.). The cDNA was then subjected to the 2× Master Mix without UNG and PCR amplification was carried out on the ABI 7900HT Sequence Detection System (Applied Biosystems, Foster City, Calif.) in the 384-well block format using a 10 μl reaction size. The primer and probe concentrations were 4 μM and 2.5 μM, respectively. The reaction mixture was incubated at 48° C. for 30 min for the reverse transcription, followed by a Amplitaq activation step of 95° C. for 10 min and finally 40 cycles of 95° C. for 15 sec denaturing and 60° C. for 1 min anneal and extension. On each plate a standard curve is generated from 8 pg to 80 ng and when the R2 value was greater than 0.99 the Cycle Threshold (Ct) values were accepted.

[0116] Sequences used in the reactions were as follows, each written in the 5′ to 3′ direction.

TABLE 12

| | | |
|---|---|---|
| | | SEQ |
| | | ID |
| Description | Sequence | NO: |

| | | |
|---|---|---|
| L1CAM Forward | CCACAGATGACATCAGCCTCAA | 13 |
| L1CAM Reverse | GGTCACACCCAGCTCTTCCTT | 14 |
| L1CAM probe | TGGCAAGCCCGAAGTGCAGTTCC | 15 |
| Tyrosinase | CTTTAGAAATACACTGGAAGGATTTGCTA | 1000 |
| Forward | | |
| Tyrosinase | CATTGTGCATGCTGCTTTGA | 1001 |
| Reverse | | |
| Tyrosinase probe | TCCACTTACTGGGATAGCGGATGCCTC | 1002 |
| MART1 Forward | ACTTCATCTATGGTTACCCCAAGAA | 1003 |
| MART1 Reverse | TCCCAGCGGCCTCTTCA | 1004 |
| MART1 Probe | CACGGCCACTCTTACACCACGGC | 1005 |
| HMB45 Forward | CTTAAGGCTGGTGAAGAGACAAGTC | 1006 |
| gp100 Reverse | CAGGATCTCGGCACTTTCAATAC | 1007 |
| gp100 Probe | TCGATATGGTTCCTTTTCCGTCACCCTG | 1008 |
| PLAB Forward | ATTCGAACACCGACCTCGTC | 1009 |
| PLAB Reverse | CGCAGGTGCAGGTGGC | 1010 |
| PLAB Probe | GATACTCACGCCAGAAGTGCGGCT | 1011 |

[0117] For each sample ΔCt=Ct (Target Gene)—Ct β-actin was calculated. ΔCt has been widely used in clinical RT-PCR assays and was chosen as a straightforward method. Cronin et al. (2004). T-test was performed on ΔCt between the melanoma and non-melanoma samples including both primary and LN samples. We then used ΔCt to construct two scores for each patient. One score was derived from a combination of 2 melanoma specific genes, PLAB and LlCAM; and the other score was derived from a combination of 3 conventional melanoma markers, tyrosinase, gplOO and MARTl. The score was defined as the weighted sum of ΔCt values of the tested genes with the corresponding t statistics as the weight. The two scores were normalized to have the same mean in order to compare them on the same scale.

[0118] We examined a combination of two highly overexpressed in melanoma genes, PLAB and LlCAM, in a variety of clinical tissue samples containing malignant melanocytes (primary melanoma and melanoma LN metastasis), benign melanocytes (benign skin nevi) and normal samples (normal skin and melanoma-free LN) by RT-PCR. The primary tissues were the same as those used for the microarray study while all the LN specimens were derived from independent patients. Conventional melanoma markers, such as tyrosinase, gplOO and MARTI, were also tested on the same samples as the controls because they are the most commonly used markers for the melanoma molecular assays in current clinical studies. Rimboldi et al. (2003); Abrahamsen et al. (2005); and Kammula et al. (2004). Calculated scores were presented on FIG. 4A for PLAB and LlCAM and on FIG. 4B for tyrosinase, gplOO and MARTl. The results demonstrated significant difference in expression of PLAB and LlCAM between malignant melanoma samples (primary and LN metastasis) and benign nevi and normal LN. In contrast, three conventional markers showed similar expression levels in benign and melanoma samples. To further demonstrate the ability of gene markers to separate benign and malignant tissues, we tested two cut-offs; first was set up as the highest score in primary normal samples and the second as the highest score in benign nevi samples. For each cut-off we estimated sensitivity and of the assay in the LN samples. With the cut-off determined on the normal samples, the new markers and the conventional markers gave sensitivity of 90% and 83%, respectively. Using the cut-off determined on the benign samples, the sensitivity for the new and conventional markers were 88% and 42%. The results indicated that the new markers potentially have better abilities to differentiate tissues containing benign and malignant melanocytes.

### EXAMPLE 8

### Multiplex Assay

[0119] Materials and Methods

[0120] Each reaction was set up in a final volume of 25 μl containing the following:

| | |
|---|---|
| forward primer | 40O nM |
| reverse primer | 50O nM |
| PLAB probe | 15O nM |
| Tyrosinase probe | 30O nM |
| L1CAM probe | 20O nM |
| PBGD probe | 20O nM |
| Tth | 5 U |
| Ab TP 6-25 | i μg |
| Glycerol | 10% |
| Tris-HCl | 3J mM |
| NaCl | 4 mM |
| EDTA | 0.004 mM |
| Tween-20 | 0.22% |
| NP-40 | 0.02% |
| DTT | 0.04 mM |
| Potassium Hydroxide | 20.5 mM |
| Bicine | 5O mM |
| Potassium Acetate | 115 mM |
| Albumin, bovine | 5 μg |
| Trehalose | 0.15 M |
| dNTP | 0.2 mM ea |
| MgCl₂ | 0.5 mM |
| MnSO₄ | 3.5 mM |
| Primers | 300 nM ea |
| Probes | 200 nM ea |

[0121] The primer and probe sequences are provided in Table 13.

TABLE 13

| | | |
|---|---|---|
| SEQ | | |
| ID NO | Sequence 5′-3′ | Function |

| | | |
|---|---|---|
| 43 | gaacaccgacctcgtccc | PLAB Upper Primer |
| 44 | ggcggcccgagagata | PLAB Lower Primer |
| 45 | Fam-cgccagaagtgcggctgggat-BHQ1-tt | PLAB Probe |
| 55 | actcagcccagcatcattcttc | Tyr Upper Primer |
| 56 | atggctgttgtactcctccaatc | Tyr Lower Primer |
| 57 | Q570-cttctcctcttggcagattgtctgtagc BHQ2-tt | Tyr Probe |
| 49 | ccacagatgacatcagcctcaa | L1CAM Upper Primer |
| 50 | ggtcacacccagctcttcctt | L1CAM Lower Primer |
| 51 | Ca1Red-tggcaagcccgaagtgcagttcc-BHQ2-tt | L1CAM Probe |
| 58 | ccacacacagcctactttccaa | PBGD Upper Primer |
| 59 | tacccacgcgaatcactctca | PBGD Lower Primer |
| 60 | Q670-aacggcaatgcggctgcaacggcggaa-BHQ2-tt | PBGD Probe |

[0122] The reactions are run with PLAB in Fam, Tyrosinase in Cy3, LlCAM in Texas Red, and PBGD in Cy5 channels. The cycling protocol used is described below and takes 30 min to complete.
[0123] 95° C.×15 sec
[0124] 65° C.×420 sec
[0125] 40° cycles of:
[0126] 95° C. for 5 sec
[0127] 62° C. for 15 sec—fiuor read

[0128] The thresholds used are 30 in Fam, 20 in Cy3, 20 in Texas Red, and 20 in Cy5 channels. The thresholds employed in the Cy3 and Texas red channels can be lowered. The results obtained are summarized in Table 14.

TABLE 14
Best Marker Combinations

| | % Sensitivity | |
|---|---|---|
| Markers | (95% CI) | % Specificity (95% CI) |
| L1CAM + PLAB | 82 (73-89) | 96 (87-100) |
| Tyrosinase + ME20M (GP100) | 63 (52-72) | 100 (94-100) |
| L1CAM + PLAB + Tyrosinase | 87 (79-93) | 96 (87-100) |

[0129] Ct Cutoffs:

| | |
|---|---|
| L1CAM | 27 |
| PLAB | 29 |
| Tyrosinase | 23 |
| ME20M (GP1OO) | 23.5 |

[0130] Note: these data are benchmarked against H&E pathology only. The amplification efficiency in each of the 4 reactions is high and the reaction is also linear over 5 logs (as judged by the R2 value which is >0.99 in all cases). Therefore, these data demonstrate a working 4 plex, rapid assay. These data suggest that PLAB is the primary marker and complementation, achieved with LlCAM, further increases sensitivity. If required, addition of tyrosinase as a third marker further complements LlCAM and PLAB and increases sensitivity. Tyrosinase can be dropped from the assay, if needed, without affecting the performance of the remaining markers.

Discussion

[0131] We performed gene expression profiling analysis of primary melanoma, benign nevi and normal skin tissue specimens in order to find melanoma specific gene markers for potential use in the LN molecular staging assay. Novel genes that are highly and differentially expressed in malignant melanoma samples were identified. Inclusion of benign nevi in the experimental design was key to our study. In contrast to normal skin, melanocyte content in benign nevi is close to that in melanoma. This was confirmed, in addition to histological assessment, by equally high expression level of conventional melanoma markers such as tyrosinase and MARTl in both melanoma and nevi tissue specimens. Similar cellular composition allowed us to monitor gene expression changes specifically associated with melanocyte malignant transformation, not just with melanocyte lineage differentiation. As the result, we identified novel genes specifically overexpressed in melanoma. One of the novel highly overexpressed in melanoma genes, prostate differentiation factor (PLAB, MICl), is a member of transforming growth factor-beta superfamily and also known to be associated with other malignancies. Bae et al. (2003); and Welsh et al. (2003). PLAB reduces cell adhesion (Yamauchi et al. (2003)), implicating its potential role in melanoma progression. Pathway analysis of the overexpressed genes in melanoma indicated that many of these genes belong to neural tissue functioning and development, suggesting that dedifferentiation of melanocytes and activation of the processes related to a pluripotent progenitor cell might be important for melanoma development and progression. Moreover, the analysis of canonical pathways showed that neural tissue associated amyloid processing is significantly modulated in melanoma. Amyloid processing (APP) pathway itself has not been associated with melanoma development and progression before. Many genes in the APP pathway, such as members of the β- and Y-secretase family (BACE2, PSEN2) also participate in the Notch pathway and play a role of cleavage of integral membrane proteins in both Notch and APP. Esler et al. (2001). Notch suppresses differentiation and helps maintain neural crest stem cells in undifferentiated state (Gangemi et al. (2004)) and Notch's involvement in melanoma and, particularly, the role of Y-secretases is the focus of many studies. Hoek et al. (2004); Baldi et al. (2003); and Wilson et al. (2000).

[0132] We have compared our results to the recent study of Haqq et al (2005). In their work, cDNA microarray containing 20,862 probes was used to profile benign nevi, primary melanoma and metastatic melanoma specimens. The sample set included metastatic and primary melanoma and benign nevi. Similar clustering results that separated the benign nevi and the primary malignant melanoma tissues were found in their study. Common genes were reported in both studies that can discriminate melanoma from benign nevi including kinesin-like 5 (KNSL5), prostate differentiation factor (PLAB), CITEDl, osteopontin (SPPl), cathepsin B (CSTB), cadherin 3 (CDH3), presenilin 2 (PSEN2).

[0133] Our results of the one-step RT-PCR assay demonstrated that novel melanoma specific gene PLAB and LlCAM expressed not only in primary melanoma tissues but also in melanoma LN metastasis. Moreover, the ability to differentiate malignant melanoma from benign nevi made them better candidates than the conventional markers for the molecular test of melanoma diagnostics. With further validation in clinical studies, these genes could be developed as specific markers for a molecular staging assay to detect melanoma micrometastasis during sentinel lymph node (SLN) biopsy procedure. Another potential application of the genes is for diagnosis of melanocyte lesions with uncertain pathological features.

[0134] Although the foregoing invention has been described in some detail by way of illustration and example for purposes of clarity of understanding, the descriptions and examples should not be construed as limiting the scope of the invention.

TABLE 15
Sequence Descriptions, names and SEQ ID NOS:

| | | | | |
|---|---|---|---|---|
| 1 | | | PLAB | |
| 2 | | | L1CAM | |
| 3 | | | NTRK | |
| 4 | | | | PLAB forward primer |
| 5 | | | | PLAB reverse primer |
| 6 | | | | PLAB probe |
| 7 | | | | PLAB upper primer |
| 8 | | | | PLAB lower primer |
| 9 | | | | PLAB probe |
| 10 | | | | L1CAM forward primer |
| 11 | | | | L1CAM reverse primer |
| 12 | | | | L1CAM probe |
| 13 | | | | L1CAM upper primer |
| 14 | | | | L1CAM lower primer |
| 15 | | | | L1CAM probe |
| 16 | | | | NTRK primer |
| 17 | | | | NTRK primer |
| 18 | | | | NTRK probe |
| 19 | | | | Tyrosinase upper primer |
| 20 | | | | Tyrosinase lower primer |
| 21 | | | | Tyrosinase probe |
| 22 | | | | PBGD upper primer |
| 23 | | | | PBGD lower primer |
| 24 | | | | PBGD probe |
| 25 | | | | PLAB amplicon |
| 26 | | | | L1CAM amplicon |
| 27 | | | | Tyrosinase amplicon |
| 28 | | | | PBGD amplicon |
| 29 | 200078_s_at | BC005876 | | ATPase, H+ transporting, lysosomal |
| 30 | 200601_at | U48734 | | non-muscle alpha-actinin |
| 31 | 200612_s_at | NM_001282 | AP2B1 | adaptor-related protein complex 2, β 1 |
| 32 | 200644_at | NM_023009 | MACMARCKS | macrophage myristoylated alanine- |
| | | | | rich C kinase substrate |
| 33 | 200660_at | NM_005620 | S100A11 | S100 calcium-binding protein A11 |
| 34 | 200707_at | NM_002743 | PRKCSH | protein kinase C substrate 80K-H |
| 35 | 200736_s_at | NM_000581 | GPX1 | glutathione peroxidase 1 |
| 36 | 200737_at | NM_000291 | PGK1 | phosphoglycerate kinase 1 |
| 37 | 200783_s_at | NM_005563 | LAP 18 | leukemia-assoc phosphoprotein p18 |
| 38 | 200825_s_at | NM_006389 | ORP150 | oxygen regulated protein (15O kD) |
| 39 | 200827_at | NM_000302 | PLOD | procollagen-lysine, 2-oxoglutarate 5- |
| | | | | dioxygenase |
| 40 | 200837_at | NM_005745 | DXS1357E | accessory proteins BAP31BAP29 |
| 41 | 200838_at | NM_001908 | CTSB | cathepsin B |
| 42 | 200839_s_at | NM_001908 | CTSB | |
| 43 | 200859_x_at | NM_001456 | FLNA | filamin A, alpha |
| 44 | 200910_at | NM_005998 | CCT3 | chaperonin containing TCP1, sub 3(γ) |
| 45 | 200950_at | NM_006409 | ARPC1A | actin related protein 23 complex, sub |
| | | | | 1A |
| 46 | 200950_at | NM_006409 | ARPC1A | |
| 47 | 200966_x_at | NM_000034 | ALDOA | aldolase A, fructose-bisphosphate |
| 48 | 200967_at | NM_000942 | PPiB | peptidylprolyl isomerase B |
| 49 | 200968_s_at | NM_000942 | PPIB | |
| 50 | 200972_at | BC000704 | | tetraspan 3 |
| 51 | 201038_s_at | BE560202 | | putative HLA class II assoc protein I |
| 52 | 201051_at | BE560202 | | putative HLA class II assoc protein I |
| 53 | 201105_at | NM_002305 | LGALS1 | lectin, galactoside-binding, soluble, 1 |
| 54 | 201106_at | NM_002085 | GPX4 | glutathione peroxidase 4 |
| 55 | 201188_s_at | D26351 | ITPR3 | type 3 inositol 1,4,5-trisphosphate |
| | | | | receptor |
| 56 | 201189_s_at | NM_002224 | ITPR3 | |
| 57 | 201195_s_at | AB018009 | | L-type amino acid transporter 1 |
| 58 | 201202_at | NM_002592 | PCNA | proliferating cell nuclear antigen |
| 59 | 201251_at | NM_002654 | PKM2 | pyruvate kinase, muscle |
| 60 | 201252_at | NM_006503 | PSMC4 | proteasome 26S subunit, ATPase, 4 |
| 61 | 201271_s_at | NM_016732 | RALY | RNA-binding protein transcript var 1 |
| 62 | 201291_s_at | NM_001067 | | topoisomerase (DNA) II alpha |
| 63 | 201313_at | NM_001975 | ENO2 | enolase 2 |
| 64 | 201346_at | NM_024551 | FLJ21432 | hypothetical protein FLJ21432 |
| 65 | 201393_s_at | NM_000876 | IGF2R | insulin-like growth factor 2 receptor |
| 66 | 201416_at | NM_003107 | | SRY-box 4 |
| 67 | 201417_at | NM_003107 | | SRY-box 4 |
| 68 | 201470_at | NM_004832 | GSTTLp28 | glutathione-S-transferase like; |
| | | | | glutathione transferase omega |
| 69 | 201474_s_at | NM_002204 | ITGA3 | integrin, alpha 3 transcript variant a |
| 70 | 201485_s_at | BC004892 | RCN2 | reticulocalbin 2, EF-hand calcium |
| | | | | binding domain |
| 71 | 201486_at | NM_002902 | RCN2 | |
| 72 | 201536_at | AL048503 | | DKFZp586M1524 |
| 73 | 201614_s_at | NM_003707 | RUVBL1 | RuvB (E coli homolog)-like 1 |
| 74 | 201660_at | | FACL3 | fatty-acid-Coenzyme A ligase, long- |
| | | | | chain 3 |
| 75 | 201661_s_at | NM_004457 | FACL3 | |
| 76 | 201662_s_at | D89053 | | Acyl-CoA synthetase 3 |
| 77 | 201670_s_at | M68956 | MARCKS 80K-L | myristoylated alanine-rich C-kinase |
| | | | | substrate |
| 78 | 201714_at | NM_001070 | TUBG1 | tubulin, gamma 1 |
| 79 | 201765_s_at | AL523158 | | hexosaminidase A |
| 80 | 201792_at | NM_001129 | AEBP1 | AE-binding protein 1 |
| 81 | 201804_x_at | NM_001281 | CKAP1 | cytoskeleton-associated protein 1 |
| 82 | 201819_at | NM_005505 | CD36L1 | CD36 antigen-like 1 |
| 83 | 201850_at | NM_001747 | CAPG | capping protein gelsolin-like |
| 84 | 201880_at | NM_005744 | | ariadne (Drosophila) homolog, |
| | | | | ubiquitin-conjugating enzyme E2- |
| | | | | binding protein, 1 |
| 85 | 201910_at | BF213279 | FARP1 | RhoGEF & pleckstrin domain 1 |
| 86 | 201911_s_at | NM_005766 | FARP1 | |
| 87 | 201931_at | NM_000126 | ETFA | electron-transfer-flavoprotein, α |
| | | | | polypeptide |
| 88 | 201954_at | NM_005720 | ARPC1B | actin related protein 23 com, sub 1A |
| 89 | 201976_s_at | NM_012334 | MYO10 | myosin X |
| 90 | 202069_s_at | AI826060 | IDH3A | isocitrate dehydrogenase 3 alpha |
| 91 | 202070_s_at | NM_005530 | IDH3A | |
| 92 | 202111_at | NM_003040 | SLC4A2 | solute carrier fam 4 anion exchanger |
| | | | | mem 2 |
| 93 | 202154_x_at | NM_006086 | TUBB4 | tubulin, beta, 4 |
| 94 | 202185_at | NM_001084 | PLOD3 | procollagen-lysine, 2-oxoglutarate 5- |
| | | | | dioxygenase |
| 95 | 202188_at | NM_014669 | KIAA0095 | KIAA0095 gene product |
| 96 | 202219_at | NM_005629 | SLC6A8 | solute carrier family 6, member 8 |
| 97 | 202224_at | NM_016823 | | v-crk avian sarcoma virus CT10 |
| | | | | oncogene homolog |
| 98 | 202225_at | NM_016823 | | v-crk avian sarcoma virus CT10 |
| | | | | oncogene homolog |
| 99 | 202260_s_at | NM_003165 | STXBP1 | syntaxin binding protein 1 |
| 100 | 202295_s_at | NM_004390 | CTSH | cathepsin H |
| 101 | 202329_at | NM_004383 | CSK | c-src tyrosine kinase |
| 102 | 202367_at | NM_001913 | CUTL1 | cut (Drosophila)-like 1 |
| 103 | 202370_s_at | NM_001755 | CBFB | core-binding factor, β sub trans var 2 |
| 104 | 202478_at | NM_021643 | GS3955 | GS3955 protein |
| 105 | 202503_s_at | NM_014736 | KIAA0101 | KIAA0101 gene product |
| 106 | 202589_at | NM_001071 | TYMS | thymidylate synthetase |
| 107 | 202603_at | N51370 | | disintegrin and metalloproteinase |
| | | | | domain 10 |
| 108 | 202705_at | NM_004701 | CCNB2 | cyclin B2 |
| 109 | 202737_s_at | NM_012321 | LSM4 | U6 snRNA-associated Sm-like protein |
| 110 | 202779_s_at | NM_014501 | E2-EPF | ubiquitin carrier protein |
| 111 | 202785_at | NM_005001 | NDUFA7 | NADH dehydrogenase 1 α |
| | | | | subcomplex, 7 |
| 112 | 202862_at | NM_000137 | FAH | fumarylacetoacetate |
| 113 | 202898_at | NM_014654 | KIAA0468 | KIAA0468 gene product |
| 114 | 202954_at | NM_007019 | UBCH10 | ubiquitin carrier protein E2-C |
| 115 | 202958_at | NM_002833 | PTPN9 | protein tyrosine phosphatase, non- |
| | | | | receptor type 9 |
| 116 | 202961_s_at | NM_004889 | ATP5J2 | ATP synthase, H+ transporting, |
| | | | | mitochondrial F0 complex, subunit f, |
| | | | | isoform 2 |
| 117 | 202986_at | NM_014862 | KIAA0307 | KIAA0307 gene product |
| 118 | 203011_at | NM_005536 | IMPA1 | inositol(myo)-1(or 4)- |
| | | | | monophosphatase 1 |
| 119 | 203022_at | NM_006397 | RNASEHI | ribonuclease HI, large subunit |
| 120 | 203069_at | NM_014849 | KIAA0736 | KIAA0736 gene product |
| 121 | 203071_at | NM_004636 | SEMA3B | sema domain, Ig domain, short basic |
| | | | | domain, secreted, 3B |
| 122 | 203094_at | NM_014628 | KIAA0110 | gene predicted from cDNA |
| 123 | 203145_at | NM_006461 | DEEPEST | mitotic spindle coiled-coil related |
| 124 | 203167_at | NM_003255 | TIMP2 | tissue inhibitor of metalloproteinase 2 |
| 125 | 203217_s_at | NM_003896 | SIAT9 | sialyltransferase 9 |
| 126 | 203234_at | NM_003364 | UP | uridine phosphorylase |
| 127 | 203256_at | NM_001793 | CDH3 | cadherin 3, type 1, P-cadherin |
| | | | | (placental) |
| 128 | 203262_s_at | NM_004699 | DXS9928E | chromosome X 9928 expressed seq |
| 129 | 203300_x_at | NM_003916 | AP1S2 | adaptor-related protein complex 1, |
| | | | | sigma 2 subunit |
| 130 | 203315_at | BC000103 | | NCK adaptor protein 2, |
| 131 | 203366_at | NM_002693 | POLG | polymerase (DNA directed), gamma |
| 132 | 203396_at | NM_002789 | PSMA4 | proteasome subunit, α type, 4 |
| 133 | 203452_at | NM_012200 | B3GAT3 | beta-1,3-glucuronyltransferase 3 |
| 134 | 203456_at | NM_007213 | JM4 | JM4 protein |
| 135 | 203502_at | NM_001724 | BPGM | 2,3-bisphosphoglycerate mutase |
| 136 | 203518_at | NM_000081 | CHS1 | Chediak-Higashi syndrome 1 |
| 137 | 203554_x_at | NM_004219 | PTTG1 | pituitary tumor-transforming 1 |
| 138 | 203557_s_at | NM_000281 | PCBD | 6-pyruvoyl-tetrahydropterin |
| | | | | synthasedimerization cofactor of |
| | | | | hepatocyte nuclear factor 1 alpha |
| 139 | 203570_at | NM_005576 | LOXL1 | lysyl oxidase-like 1 |
| 140 | 203590_at | NM_006141 | DNCLI2 | dynein, cytoplasmic, light intermediate |
| | | | | polypeptide 2 |
| 141 | 203643_at | NM_006494 | ERF | Ets2 repressor factor |
| 142 | 203663_s_at | NM_004255 | COX5A | cytochrome c oxidase subunit Va |
| 143 | 203668_at | NM_006715 | MAN2C1 | mannosidase, α, class 2C, mem 1 |
| 144 | 203693_s_at | NM_001949 | E2F3 | E2F transcription factor 3 |
| 145 | 203695_s_at | NM_004403 | DFNA5 | deafness, autosomal dominant 5 |
| 146 | 203723_at | NM_002221 | ITPKB | inositol 1,4,5-trisphosphate 3-kinase B |
| 147 | 203729_at | NM_001425 | EMP3 | epithelial membrane protein 3 |
| 148 | 203730_s_at | BF196931 | ZFP95 | zinc finger protein homologous to |
| | | | | Zfp95 in mouse |
| 149 | 203731_s_at | NM_014569 | ZFP95 | |
| 150 | 203775_at | NM_014251 | SLC25A13 | solute carrier family 25, member 13 |
| 151 | 203827_at | NM_017983 | FLJ10055 | hypothetical protein FLJ10055 |
| 152 | 203878_s_at | NM_005940 | MMP11 | matrix metalloproteinase 11 |
| 153 | 204014_at | NM_001394 | DUSP4 | dual specificity phosphatase 4 |
| 154 | 204015_s_at | BC002671 | DUSP4 | |
| 155 | 204033_at | NM_004237 | TRIP13 | thyroid hormone receptor interactor 13 |
| 156 | 204092_s_at | NM_003600 | STK15 | serinethreonine kinase 15 |
| 157 | 204099_at | NM_003078 | SMARCD3 | SWISNF related, matrix associated, |
| | | | | actin dependent regulator of |
| | | | | chromatin, subfamily d, member 3 |
| 158 | 204170_s_at | NM_001827 | CKS2 | CDC28 protein kinase 2 |
| 159 | 204197_s_at | NM_004350 | RUNX3 | runt-related transcription factor 3 |
| 160 | 204198_s_at | AA541630 | RUNX3 | |
| 161 | 204202_at | NM_017604 | KIAA1023 | KIAA1023 protein |
| 162 | 204228_at | NM_006347 | USA-CYP | cyclophilin |
| 163 | 204244_s_at | NM_006716 | ASK | activator of S phase kinase |
| 164 | 204247_s_at | NM_004935 | CDK5 | cyclin-dependent kinase 5 |
| 165 | 204252_at | M68520 | | cdc2-related protein kinase |
| 166 | 204262_s_at | NM_000447 | PSEN2 | presenilin 2 transcript variant 1 |
| 167 | 204423_at | NM_013255 | MKLN1 | muskelin 1, intracellular mediator |
| | | | | containing kelch motifs |
| 168 | 204436_at | NM_025201 | PP1628 | hypothetical protein PP1628 |
| 169 | 204458_at | AL110209 | | DKFZp564A0122 |
| 170 | 204467_s_at | NM_000345 | SNCA | synuclein, α transcript var NACP140 |
| 171 | 204584_at | AI653981 | L1CAM | L1 cell adhesion molecule, MASA |
| | | | | transcript var 1 |
| 172 | 204585_s_at | NM_000425 | L1CAM | |
| 173 | 204647_at | NM_004838 | HOMER-3 | Homer, neuronal imm early gene, 3 |
| 174 | 204654_s_at | NM_003220 | TFAP2A | transcription factor AP-2 alpha |
| 175 | 204709_s_at | NM_004856 | KNSL5 | kinesin-like 5 |
| 176 | 204778_x_at | AW102783 | HOXB7 | homeo box B7 |
| 177 | 204779_s_at | NM_004502 | HOXB7 | |
| 178 | 204857_at | NM_003550 | MAD1L1 | MAD1-like 1 |
| 179 | 204932_at | BF433902 | | TNF receptor superfam, mem 11b |
| 180 | 204973_at | NM_000166 | GJB1 | gap junction protein, beta 1, 32 kD |
| 181 | 204995_at | AL567411 | | cyclin-dependent kinase 5, regulatory |
| | | | | sub 1 (p35) |
| 182 | 205051_s_at | NM_000222 | KIT | v-kit Hardy-Zuckerman 4 feline |
| | | | | sarcoma viral oncogene homolog |
| 183 | 205142_x_at | NM_000033 | ABCD1 | ATP-binding cassette, sub-family D |
| | | | | (ALD), mem 1 |
| 184 | 205169_at | NM_005057 | RBBP5 | retinoblastoma-binding protein 5 |
| 185 | 205373_at | NM_004389 | CTNNA2 | catenin alpha 2 |
| 186 | 205376_at | NM_003866 | INPP4B | inositol polyphosphate-4- |
| | | | | phosphatase, type II, 105 kD |
| 187 | 205405_at | NM_003966 | SEMA5A | sema domain, seven thrombospondin |
| | | | | repeats, transmembrane domain and |
| | | | | short cytoplasmic domain 5A |
| 188 | 205447_s_at | BE222201 | | mitogen-activated protein kinase |
| | | | | kinase kinase 12 |
| 189 | 205458_at | BG034972 | | melanocortin 1 receptor |
| 190 | 205566_at | NM_007011 | HS1-2 | putative transmembrane protein |
| 191 | 205591_at | NM_006334 | AMY | neuroblastoma (nerve tissue) protein |
| 192 | 205681_at | NM_004049 | BCL2A1 | BCL2-related protein A1 |
| 193 | 205690_s_at | NM_003910 | G10 | maternal G10 transcript |
| 194 | 205691_at | NM_004209 | SYNGR3 | synaptogyrin 3 |
| 195 | 205717_x_at | NM_002588 | PCDHGC3 | protocadherin gamma subfamily C, 3 |
| 196 | 205813_s_at | NM_000429 | MAT1A | methionine adenosyltransferase I, α |
| 197 | 205937_at | NM_006569 | CGR11 | cell growth regulatory with EF-hand |
| | | | | domain |
| 198 | 205945_at | NM_000565 | IL6R | interleukin 6 receptor |
| 199 | 205996_s_at | NM_013411 | AK2 B | adenylate kinase 2 |
| 200 | 206128_at | AI264306 | | adrenergic, alpha-2C-, receptor |
| 201 | 206307_s_at | NM_004472 | FOXD1 | forkhead box D1 |
| 202 | 206332_s_at | NM_005531 | IFI16 | interferon, gamma-inducible 16 |
| 203 | 206397_x_at | NM_001492 | GDF1 | growth differentiation factor 1 |
| 204 | 206441_s_at | NM_017828 | FLJ20452 | hypothetical protein FLJ20452 |
| 205 | 206462_s_at | NM_002530 | NTRK3 | neurotrophic tyrosine kinase, |
| | | | | receptor, type 3 |
| 206 | 206503_x_at | NM_002675 | PML | promyelocytic leukemia |
| 207 | 206617_s_at | NM_002910 | RENBP | renin-binding protein |
| 208 | 206630_at | NM_000372 | TYR | tyrosinase |
| 209 | 206688_s_at | NM_006693 | CPSF4 | cleavage and polyadenylation specific |
| | | | | factor 4, 30 kD subunit |
| 210 | 206696_at | NM_000273 | OA1 | ocular albinism 1 |
| 211 | 206777_s_at | NM_000496 | CRYBB2 | crystallin, beta B2 |
| 212 | 206864_s_at | NM_003806 | HRK | harakiri, BCL2-interacting protein |
| 213 | 206976_s_at | NM_006644 | HSP105B | heat shock 105 kD |
| 214 | 207038_at | NM_004694 | SLC16A6 | solute carrier family 16 member 6 |
| 215 | 207060_at | NM_001427 | EN2 | engrailed homolog 2 |
| 216 | 207144_s_at | NM_004143 | CITED1 | Cbpp300-interacting transactivator, |
| | | | | with GluAsp-rich carboxy-terminal |
| | | | | domain, 1 |
| 217 | 207163_s_at | NM_005163 | AKT1 | v-akt murine thymoma viral oncogene |
| | | | | homolog 1 |
| 218 | 207183_at | NM_006143 | GPR19 | G protein-coupled receptor 19 |
| 219 | 207592_s_at | NM_001194 | HCN2 | hyperpolarization activated cyclic |
| | | | | nucleotide-gated potassium channel 2 |
| 220 | 207614_s_at | NM_003592 | CUL1 | cullin 1 |
| 221 | 207622_s_at | NM_005692 | ABCF2 | ATP-binding cassette, sub-fam F |
| | | | | mem 2 |
| 222 | 207828_s_at | NM_005196 | CENPF | centromere protein F |
| 223 | 208002_s_at | NM_007274 | HBACH | cytosolic acyl coenzyme A thioester |
| | | | | hydrolase |
| 224 | 208089_s_at | NM_030794 | FLJ21007 | hypothetical protein FLJ21007 |
| 225 | 208308_s_at | NM_000175 | GPI | glucose phosphate isomerase |
| 226 | 208540_x_at | NM_021039 | S100A14 | S100 calcium-binding protein A14 |
| 227 | 208644_at | M32721 | | poly(ADP-ribose) polymerase |
| 228 | 208657_s_at | AF142408 | | cell division control protein septin D1 |
| 229 | 208677_s_at | AL550657 | | Basigin |
| 230 | 208696_at | AF275798 | | PNAS-102 |
| 231 | 208710_s_at | AI424923 | | adaptor-related protein complex 3, |
| | | | | delta 1 subunit |
| 232 | 208723_at | BC000350 | | ubiquitin specific protease 11 |
| 233 | 208744_x_at | BG403660 | | heat shock 105 kD |
| 234 | 208837_at | BC000027 | | integral type I protein |
| 235 | 208916_at | AF105230 | SLC1A5 | neutral amino acid transporter |
| 236 | 208928_at | AF258341 | | NADPH-cytochrome P450 reductase |
| 237 | 208956_x_at | U62891 | DUT | deoxyuridine triphosphatase |
| 238 | 208974_x_at | BC003572 | | karyopherin (importin) beta 1 |
| 239 | 208975_s_at | L38951 | | importin beta subunit |
| 240 | 209015_s_at | BC002446 | | MRJ gene for a member of DNAJ fam |
| 241 | 209036_s_at | BC001917 | | malate dehydrogenase 2, NAD |
| 242 | 209053_s_at | AF083389 | | Wolf-Hirschhorn syn candidate 1 |
| 243 | 209072_at | M13577 | MBP | myelin basic protein |
| 244 | 209079_x_at | AF152318 | PCDH-gamma- | protocadherin gamma A1 |
| | | | A1 | |
| 245 | 209081_s_at | NM_030582 | COL18A1 | collagen, type XVIII, alpha 1 |
| 246 | 209123_at | BC000576 | | quinoid dihydropteridine reductase |
| 247 | 209132_s_at | BE313890 | | hypothetical protein FLJ20452 |
| 248 | 209172_s_at | U30872 | | mitosin |
| 249 | 209197_at | AA626780 | | KIAA0080 protein |
| 250 | 209198_s_at | BC004291 | | Similar to synaptotagmin 11 |
| 251 | 209247_s_at | BC001661 | | ATP-binding cassette, sub-fam F |
| | | | | mem 2 |
| 252 | 209254_at | AF277177 | | KIAA0265 protein |
| 253 | 209255_at | AF277177 | | KIAA0265 protein |
| 254 | 209256_s_at | AF277177 | | PNAS-119 |
| 255 | 209283_at | AF007162 | | unknown mRNA |
| 256 | 209345_s_at | AL561930 | | phosphatidylinositol 4-kinase type II |
| 257 | 209407_s_at | AF068892 | | Dukes type B colon adenocarcinoma |
| | | | | truncated suppressin |
| 258 | 209515_s_at | U38654 | | Rab27a |
| 259 | 209773_s_at | BC001886 | | ribonucleotide reductase M2 polypep |
| 260 | 209825_s_at | BC002906 | | Sim to uridine monophosphate kinase |
| 261 | 209827_s_at | NM_004513 | IL16 | interleukin 16 |
| 262 | 209828_s_at | M90391 | | putative IL-16 protein precursor |
| 263 | 209848_s_at | U01874 | | me20m |
| 264 | 209875_s_at | M83248 | | nephropontin |
| 265 | 209932_s_at | U90223 | | deoxyuridine triphosphate |
| | | | | nucleotidohydrolase precursor |
| 266 | 210052_s_at | AF098158 | | restricted expressed proliferation |
| | | | | associated protein 100 |
| 267 | 210073_at | L32867 | | alpha 2,8-sialyltransferase |
| 268 | 210111_s_at | AF277175 | | PNAS-138 |
| 269 | 210127_at | BC002510 | | small GTPase RAB6B |
| 270 | 210854_x_at | U17986 | | GABAnoradrenaline transporter |
| 271 | 210926_at | AY014272 | FKSG30 | FKSG30 |
| 272 | 210948_s_at | AF294627 | LEF1 | lymphoid enhancer factor 1 isoform |
| 273 | 210951_x_at | AF125393 | | Rab27 isoform |
| 274 | 211013_x_at | AF230411 | | tripartite motif protein TRIM19 lambda |
| 275 | 211052_s_at | BC006364 | | clone MGC: 12705, |
| 276 | 211066_x_at | BC006439 | | Similar to protocadherin gamma |
| | | | | subfamily A, 5 |
| 277 | 211373_s_at | U34349 | AD3LPAD5 | seven trans-membrane domain |
| 278 | 211564_s_at | BC003096 | | Sim to LIM domain protein |
| 279 | 211752_s_at | BC005954 | | clone MGC: 14592 |
| 280 | 211759_x_at | BC005969 | | clone MGC: 14625 |
| 281 | 211833_s_at | U19599 | | BAX delta |
| 282 | 212000_at | AB002363 | | KIAA0365 gene product |
| 283 | 212070_at | AL554008 | | G protein-coupled receptor 56 |
| 284 | 212081_x_at | AF129756 | MSH55 | MSH55 |
| 285 | 212119_at | BF348067 | | phosphatidylinositol glycan, class F |
| 286 | 212178_s_at | AK022555 | | FLJ12493 fis |
| 287 | 212193_s_at | BE881529 | | KIAA0731 protein |
| 288 | 212247_at | AW008531 | | KIAA0225 protein |
| 289 | 212285_s_at | AF016903 | | IMAGE: 3506210 |
| 290 | 212312_at | AL117381 | | clone RP5-857M17 on chrom 20 |
| 291 | 212338_at | AA621962 | | KIAA0727 protein |
| 292 | 212402_at | BE895685 | | KIAA0853 protein |
| 293 | 212472_at | BE965029 | | FLJ22463 fis |
| 294 | 212473_s_at | BE965029 | | FLJ22463 fis |
| 295 | 212512_s_at | AA551784 | | coactivator-associated arginine |
| | | | | methyltransferase-1 |
| 296 | 212520_s_at | AI684141 | | SWISNF related |
| 297 | 212552_at | BE617588 | | hippocalcin-like |
| 298 | 212715_s_at | AB020626 | | KIAA0819 protein |
| 299 | 212739_s_at | AL523860 | | non-metastatic cells 4 |
| 300 | 212744_at | AI813772 | | clone HQ0692 |
| 301 | 212745_s_at | AI813772 | | clone HQ0692 |
| 302 | 212793_at | BF513244 | | KIAA0381 protein |
| 303 | 212796_s_at | BF195608 | | KIAA1055 protein |
| 304 | 213002_at | BF347326 | MARCKS, 80K-L | myristoylated alanine-rich protein |
| | | | | kinase C substrate |
| 305 | 213007_at | BG478677 | | polymerase (DNA directed), gamma |
| 306 | 213008_at | BG478677 | | polymerase (DNA directed), gamma |
| 307 | 213096_at | T51252 | | KIAA0481 gene product |
| 308 | 213131_at | R38389 | | olfactomedin related ER localized |
| 309 | 213169_at | BG109855 | | clone TUA8 Cri-du-chat region |
| 310 | 213215_at | AI910895 | | clone EUROIMAGE 42138 |
| 311 | 213217_at | AU149572 | | adenylate cyclase 2(brain) |
| 312 | 213241_at | AF035307 | | clone 23785 |
| 313 | 213274_s_at | BE875786 | | cathepsin B |
| 314 | 213275_x_at | BE875786 | | cathepsin B |
| 315 | 213330_s_at | BE886580 | | stress-induced-phosphoprotein 1 |
| 316 | 213333_at | AL520774 | | malate dehydrogenase 2, NAD |
| 317 | 213338_at | BF062629 | | DKFZP586E1621 protein |
| 318 | 213392_at | AW070229 | | G protein-coupled receptor, fam C, |
| | | | | group 5, mem B |
| 319 | 213474_at | AI890903 | | ESTs |
| 320 | 213496_at | AW592563 | | KIAA0455 gene product |
| 321 | 213573_at | AA861608 | | karyopherin (importin) beta 1 |
| 322 | 213587_s_at | AI884867 | | ribosomal protein L26 |
| 323 | 213638_at | AW054711 | | PAC 257A7 on chromosome 6p24 |
| 324 | 213670_x_at | AI768378 | | KIAA0618 gene product |
| 325 | 213720_s_at | AI831675 | | SWISNF related, matrix associated, |
| | | | | actin dependent regulator of |
| | | | | chromatin, subfam a, member 4 |
| 326 | 213746_s_at | AW051856 | | filamin A, alpha |
| 327 | 213836_s_at | AW052084 | | KIAA1001 protein |
| 328 | 213895_at | BF445047 | | epithelial membrane protein 1 |
| 329 | 213960_at | T87225 | | CLONE = IMAGE: 22392 |
| 330 | 214023_x_at | AL533838 | | tubulin, beta polypeptide |
| 331 | 214068_at | AF070610 | | clone 24505 |
| 332 | 214104_at | AI703188 | | G-protein coupled receptor |
| 333 | 214201_x_at | AA742237 | | HLA-B associated transcript-2 |
| 334 | 214581_x_at | BE568134 | | death receptor 6 |
| 335 | 214614_at | AI738662 | | homeo box HB9 |
| 336 | 214632_at | AA295257 | | neuropilin 2 |
| 337 | 214656_x_at | BE790157 | | myosin IB |
| 338 | 214687_x_at | AK026577 | | FLJ22924 fis |
| 339 | 214708_at | BG484314 | | syntrophin, beta 1 |
| 340 | 214710_s_at | BE407516 | | cyclin B1 |
| 341 | 214714_at | AK022360 | | FLJ12298 fis |
| 342 | 214717_at | AL137534 | | DKFZp434H1419 |
| 343 | 214752_x_at | AI625550 | | filamin A, alpha |
| 344 | 214778_at | AB011541 | | MEGF8 |
| 345 | 214841_at | AF070524 | | clone 24453 |
| 346 | 214893_x_at | AI421964 | | hyperpolarization activated cyclic |
| | | | | nucleotide-gated potassium channel 2 |
| 347 | 214896_at | AL109671 | | EUROIMAGE 29222 |
| 348 | 215025_at | S76476 | | trkC {alternatively spliced} |
| 349 | 215115_x_at | AI613045 | | ets variant gene 6 (TEL oncogene) |
| 350 | 215126_at | AL109716 | | EUROIMAGE 208948 |
| 351 | 215155_at | J04178 | HEXA | abnormal β-hexosaminidase α chain |
| 352 | 215311_at | AL109696 | | EUROIMAGE 21920 |
| 353 | 215812_s_at | U41163 | SLC6A10 | creatine transporter |
| 354 | 215836_s_at | AK026188 | | FLJ22535 fis |
| 355 | 216194_s_at | AD001527 | | DNA from chrom 19-cosmid f24590 |
| | | | | containing CAPNS and POL2RI |
| 356 | 216973_s_at | S49765 | | homeo box B7 |
| 357 | 217033_x_at | S76475 | trkC | neurotrophic tyrosine kinase, |
| | | | | receptor, type 3 |
| 358 | 217104_at | AL109714 | | EUROIMAGE 327506 |
| 359 | 217226_s_at | M95929 | PHOX1 | Paired mesoderm homeo box 1 |
| 360 | 217297_s_at | AF143684 | MYO9b | unconventional myosin IXb |
| 361 | 217377_x_at | AF041811 | ETV6-NTRK3 | ETS related protein-growth factor |
| | | | fusion | receptor tyrosine kinase fusion |
| | | | | proteins |
| 362 | 217419_x_at | AK021586 | | FLJ11524 fis |
| 363 | 217624_at | AA464753 | | ESTs |
| 364 | 217799_x_at | NM_003344 | UBE2H | ubiquitin-conjugating enzyme E2H |
| 365 | 217827_s_at | NM_016630 | ACP33 | acid cluster protein 33 |
| 366 | 217867_x_at | NM_012105 | BACE2 | beta-site APP-cleaving enzyme 2 |
| 367 | 217874_at | NM_003849 | SUCLG1 | succinate-CoA ligase, GDP-forming, |
| | | | | alpha subunit |
| 368 | 217891_at | NM_022744 | FLJ13868 | hypothetical protein FLJ13868 |
| 369 | 218009_s_at | NM_003981 | PRC1 | protein regulator of cytokinesis 1 |
| 370 | 218030_at | NM_014030 | GIT1 | G protein-coupled receptor kinase- |
| | | | | interactor 1 |
| 371 | 218074_at | NM_016062 | LOC51647 | CGI-128 protein |
| 372 | 218143_s_at | NM_005697 | SCAMP2 | secretory carrier membrane protein 2 |
| 373 | 218151_x_at | NM_024531 | FLJ11856 | hypothetical protein FLJ11856 |
| 374 | 218152_at | NM_018200 | HMG20A | high-mobility group 20A |
| 375 | 218161_s_at | NM_017882 | FLJ20561 | hypothetical protein FLJ20561 |
| 376 | 218175_at | NM_025140 | FLJ22471 | hypothetical protein FLJ22471 |
| 377 | 218330_s_at | NM_018162 | FLJ10633 | hypothetical protein FLJ10633 |
| 378 | 218349_s_at | NM_017975 | FLJ10036 | hypothetical protein FLJ10036 |
| 379 | 218359_at | NM_024958 | FLJ23329 | hypothetical protein FLJ23329 |
| 380 | 218376_s_at | NM_022765 | FLJ11937 | hypothetical protein FLJ11937 |
| 381 | 218447_at | NM_020188 | DC13 | DC13 protein |
| 382 | 218542_at | NM_018131 | FLJ10540 | hypothetical protein FLJ10540 |
| 383 | 218564_at | BC002574 | FLJ10520 | hypothetical protein FLJ10520 |
| 384 | 218618_s_at | NM_022763 | FLJ23399 | hypothetical protein FLJ23399 |
| 385 | 218678_at | NM_024609 | FLJ21841 | hypothetical protein FLJ21841 |
| 386 | 218774_at | NM_014026 | HSPC015 | HSPC015 protein |
| 387 | 218786_at | NM_016575 | TU12B1-TY | TU12B1-TY protein |
| 388 | 218824_at | NM_018215 | FLJ10781 | hypothetical protein FLJ10781 |
| 389 | 218839_at | NM_012258 | HEY1 | hairyenhancer-of-split related with |
| | | | | YRPW motif 1 |
| 390 | 218856_at | NM_016629 | LOC51323 | hypothetical protein LOC51323 |
| 391 | 218888_s_at | NM_018092 | FLJ10430 | hypothetical protein FLJ10430 |
| 392 | 218931_at | NM_022449 | FLJ12538 | hypothetical protein FLJ12538 |
| 393 | 218952_at | NM_013271 | SAAS | granin-like neuroendocrine peptide |
| | | | | precursor |
| 394 | 218956_s_at | NM_015545 | KIAA0632 | KIAA0632 protein |
| 395 | 218980_at | NM_025135 | KIAA1695 | hypothetical protein FLJ22297 |
| 396 | 218996_at | NM_013342 | TFPT | TCF3 (E2A) fusion partner |
| 397 | 219011_at | NM_020904 | PLEKHA4 | pleckstrin homology domain- |
| | | | | containing, family A member 4 |
| 398 | 219039_at | NM_017789 | FLJ20369 | hypothetical protein FLJ20369 |
| 399 | 219040_at | NM_024535 | FLJ22021 | hypothetical protein FLJ22021 |
| 400 | 219041_s_at | NM_014374 | AP4 | zinc finger protein |
| 401 | 219051_x_at | NM_024042 | MGC2601 | hypothetical protein MGC2601 |
| 402 | 219066_at | NM_021823 | MDS018 | hypothetical protein MDS018 |
| 403 | 219066_at | NM_021823 | MDS018 | hypothetical protein MDS018 |
| 404 | 219148_at | NM_018492 | TOPK | PDZ-binding kinase; T-cell originated |
| | | | | protein kinase |
| 405 | 219152_at | NM_015720 | PODLX2 | endoglycan |
| 406 | 219219_at | NM_017854 | FLJ20512 | hypothetical protein FLJ20512 |
| 407 | 219361_s_at | NM_022767 | FLJ12484 | hypothetical protein FLJ12484 |
| 408 | 219372_at | NM_014055 | CDV-1 | CDV-1 protein |
| 409 | 219408_at | NM_019023 | FLJ10640 | hypothetical protein FLJ10640 |
| 410 | 219478_at | NM_021197 | WFDC1 | WAP four-disulfide core domain 1 |
| 411 | 219491_at | NM_024036 | MGC3103 | hypothetical protein MGC3103 |
| 412 | 219522_at | NM_014344 | FJX1 | putative secreted ligand homologous |
| | | | | to fjx1 |
| 413 | 219537_x_at | NM_016941 | DLL3 | Delta (Drosophila)-like 3 |
| 414 | 219555_s_at | NM_018455 | BM039 | uncharacterized bone marrow protein |
| | | | | BM039 |
| 415 | 219578_s_at | NM_030594 | FLJ13203 | hypothetical protein FLJ13203 |
| 416 | 219634_at | NM_018413 | C4ST | chondroitin 4-sulfotransferase |
| 417 | 219637_at | NM_025139 | FLJ12584 | hypothetical protein FLJ12584 |
| 418 | 219703_at | NM_018365 | FLJ11222 | hypothetical protein FLJ11222 |
| 419 | 219742_at | NM_030567 | MGC10772 | hypothetical protein MGC10772 |
| 420 | 219895_at | NM_017938 | FLJ20716 | hypothetical protein FLJ20716 |
| 421 | 219933_at | NM_016066 | LOC51022 | CGI-133 protein |
| 422 | 220116_at | NM_021614 | KCNN2 | potassium intermediatesmall |
| | | | | conductance calcium-activated |
| | | | | channel, subfamily N, member 2 |
| 423 | 220155_s_at | NM_023924 | FLJ13441 | hypothetical protein FLJ13441 |
| 424 | 220178_at | NM_021731 | PP3501 | hypothetical protein PP3501 |
| 425 | 220454_s_at | NM_020796 | SEMA6A | sema domain, transmembrane |
| | | | | domain and cytoplasmic domain, 6A |
| 426 | 220864_s_at | NM_015965 | LOC51079 | CGI-39 protein; cell death-regulatory |
| | | | | protein GRIM19 |
| 427 | 220948_s_at | NM_000701 | ATP1A1 | ATPase, Na+K+ transporting, alpha 1 |
| | | | | polypeptide |
| 428 | 220973_s_at | NM_030974 | | hypothetical protein DKFZp434N1923 |
| 429 | 220974_x_at | NM_030971 | BA108L7.2 | similar to rat tricarboxylate carrier-like |
| 430 | 220980_s_at | NM_031284 | | hypothetical protein DKFZp434B195 |
| 431 | 221059_s_at | NM_021615 | CHST6 | carbohydrate sulfotransferase 6 |
| 432 | 221483_s_at | AF084555 | ARPP-19 | okadaic acid-inducible and cAMP- |
| | | | | regulated phosphoprotein 19 |
| 433 | 221484_at | NM_004776 | | UDP-Gal:betaGlcNAc beta 1,4- |
| | | | | galactosyltransferase, polypeptide 5 |
| 434 | 221538_s_at | AL136663 | | DKFZp564A176 |
| 435 | 221558_s_at | AF288571 | LEF1 | lymphoid enhancer factor-1 |
| 436 | 221577_x_at | AF003934 | | prostate differentiation factor |
| 437 | 221641_s_at | AF241787 | | CGI16-iso |
| 438 | 221688_s_at | AL136913 | | DKFZp586L0118 |
| 439 | 221710_x_at | BC006241 | | hypothetical protein FLJ10647 |
| 440 | 221732_at | AK026161 | | FLJ22508 fis |
| 441 | 221759_at | AL583123 | | CLONE = CS0DL009YN09 |
| 442 | 221797_at | AY007126 | | clone CDABP0028 |
| 443 | 221799_at | AB037823 | | KIAA1402 protein, |
| 444 | 221815_at | BE671816 | | ESTs |
| 445 | 221882_s_at | AI636233 | | five-span transmembrane protein M83 |
| 446 | 221902_at | AL567940 | | CLONE = CS0DF036YK19 |
| 447 | 221909_at | BF984207 | | ESTs |
| 448 | 221962_s_at | AI829920 | | ubiquitin-conjugating enzyme E2H |
| 449 | 222116_s_at | AL157485 | | DKFZp762O207 |
| 450 | 222153_at | AK023133 | | FLJ13071 fis |
| 451 | 222155_s_at | AK021918 | | FLJ11856 fis |
| 452 | 222175_s_at | AK000003 | | FLJ00003 protein |
| 453 | 222196_at | AK000470 | | FLJ20463 fis |
| 454 | 222199_s_at | AK001289 | | FLJ10427 fis |
| 455 | 222206_s_at | AA781143 | | EUROIMAGE 2021883 |
| 456 | 222212_s_at | AK001105 | | FLJ10243 fis |
| 457 | 222231_s_at | AK025328 | | FLJ21675 fis |
| 458 | 222234_s_at | AK022644 | | FLJ12582 fis |
| 459 | 222240_s_at | AL137749 | | DKFZp434A0612 |
| 460 | 222294_s_at | AW971415 | | ESTs |
| 461 | 32811_at | X98507 | | myosin-I beta |
| 462 | 40560_at | U28049 | TXB2 | TBX2 |
| 463 | 44783_s_at | R61374 | | IMAGE-37665 |
| 464 | 46665_at | AI949392 | | IMAGE-2470926 |
| 465 | 55093_at | AA534198 | | IMAGE-993116 |
| 466 | 63825_at | AI557319 | | |
| 467 | 87100_at | AI832249 | | |
| 468 | 200017_at | NM_002954 | RPS27A | ribosomal protein S27a |
| 469 | 200606_at | NM_004415 | DSP | desmoplakin (DPI, DPII) |
| 470 | 200632_s_at | NM_006096 | NDRG1 | N-myc downstream regulated |
| 471 | 200636_s_at | NM_002840 | PTPRF | protein tyrosine phosphatase, |
| | | | | receptor type, F |
| 472 | 200795_at | NM_004684 | SPARCL1 | SPARC-like 1 |
| 473 | 200810_s_at | NM_001280 | CIRBP | cold inducible RNA-binding protein |
| 474 | 200897_s_at | NM_016081 | KIAA0992 | Palladin |
| 475 | 200953_s_at | NM_001759 | CCND2 | cyclin D2 |
| 476 | 200965_s_at | NM_006720 | ABLIM-s | actin binding LIM protein 1 transcript |
| | | | | variant |
| 477 | 201012_at | NM_000700 | ANXA1 | annexin A1 |
| 478 | 201041_s_at | NM_004417 | DUSP1 | dual specificity phosphatase 1 |
| 479 | 201125_s_at | NM_002213 | ITGB5 | integrin, beta 5 |
| 480 | 201200_at | NM_003851 | CREG | cellular repressor of E1A-stimulated |
| | | | | genes |
| 481 | 201286_at | Z48199 | syndecan 1 | syndecan-1 gene (exons 2-5) |
| 482 | 201328_at | AL575509 | | v-ets avian erythroblastosis virus E26 |
| | | | | oncogene homolog 2 |
| 483 | 201425_at | NM_000690 | ALDH2 | aldehyde dehydrogenase 2, |
| | | | | mitochondrial |
| 484 | 201427_s_at | NM_005410 | SEPP1 | selenoprotein P, plasma, 1 |
| 485 | 201432_at | NM_001752 | CAT | Catalase |
| 486 | 201540_at | NM_001449 | FHL1 | four and a half LIM domains 1 |
| 487 | 201667_at | NM_000165 | GJA1 | gap junction protein, alpha 1, 43 kD |
| 488 | 201681_s_at | AB011155 | KIAA0583 | KIAA0583 |
| 489 | 201798_s_at | NM_013451 | FER1L3 | fer-1 (C. elegans)-like 3 (myoferlin) |
| 490 | 201820_at | NM_000424 | KRT5 | keratin 5 |
| 491 | 201829_at | AW263232 | NET1 | neuroepithelial cell transf gene 1 |
| 492 | 201830_s_at | NM_005863 | NET1 | neuroepithelial cell transf gene 1 |
| 493 | 201839_s_at | NM_002354 | TACSTD1 | tumor-associated calcium signal |
| | | | | transducer 1 |
| 494 | 201842_s_at | AI826799 | | EGF-containing fibulin-like |
| | | | | extracellular matrix protein 1 |
| 495 | 201843_s_at | NM_004105 | EFEMP1 | EGF-containing fibulin-like |
| | | | | extracellular matrix protein 1 |
| | | | | transcript variant 1 |
| 496 | 201983_s_at | AW157070 | | epidermal growth factor receptor |
| 497 | 201984_s_at | NM_005228 | EGFR | epidermal growth factor receptor |
| 498 | 202054_s_at | NM_000382 | ALDH3A2 | aldehyde dehydrogenase 3 family, |
| | | | | member A2 |
| 499 | 202085_at | NM_004817 | TJP2 | tight junction protein 2 |
| 500 | 202193_s_at | NM_001144 | AMFR | autocrine motility factor receptor |
| 501 | 202196_s_at | NM_013253 | DKK3 | dickkopf (Xenopus laevis) homolog 3 |
| 502 | 202242_at | NM_004615 | TM4SF2 | transmembrane 4 superfamily mem 2 |
| 503 | 202267_at | NM_005562 | LAMC2 | laminin, gamma 2, transcript variant 1 |
| 504 | 202286_s_at | J04152 | GA733-1 | gastrointestinal tumor-assoc antigen |
| 505 | 202289_s_at | NM_006997 | TACC2 | transforming, acidic coiled-coil |
| | | | | containing protein 2 |
| 506 | 202350_s_at | NM_002380 | MATN2 | matrilin 2 precursor, transcript var 1 |
| 507 | 202387_at | NM_004323 | BAG1 | BCL2-associated athanogene |
| 508 | 202489_s_at | BC005238 | | FXYD domain-containing ion |
| | | | | transport regulator 3 |
| 509 | 202525_at | NM_002773 | PRSS8 | protease, serine, 8 (prostasin) |
| 510 | 202552_s_at | NM_016441 | CRIM1 | cysteine-rich motor neuron 1 |
| 511 | 202565_s_at | NM_003174 | SVIL | supervillin transcript variant 1 |
| 512 | 202575_at | NM_001878 | CRABP2 | cellular retinoic acid-binding protein 2 |
| 513 | 202597_at | AU144284 | | interferon regulatory factor 6 |
| 514 | 202668_at | BF001670 | | ephrin-B2 |
| 515 | 202712_s_at | NM_020990 | CKMT1 | creatine kinase, mitochondrial 1 |
| | | | | nuclear gene mitochondrial protein |
| 516 | 202746_at | AL021786 | | PAC 696H22 on chrom Xq21.1-21.2 |
| 517 | 202826_at | NM_003710 | SPINT1 | serine protease inhibitor, Kunitz t 1 |
| 518 | 202890_at | T62571 | | microtubule-associated protein 7 |
| 519 | 202936_s_at | NM_000346 | SOX9 | SRY-box 9 |
| 520 | 202994_s_at | Z95331 | | clone CTA-941F9 on chrom 22q13 |
| 521 | 203037_s_at | NM_014751 | KIAA0429 | KIAA0429 gene product |
| 522 | 203074_at | NM_001630 | ANXA8 | annexin A8 |
| 523 | 203081_at | NM_020248 | LOC56998 | beta-catenin-interacting protein ICAT |
| 524 | 203126_at | NM_014214 | IMPA2 | inositol(myo)-1(or 4)- |
| | | | | monophosphatase 2 |
| 525 | 203178_at | NM_001482 | GATM | glycine amidinotransferase |
| 526 | 203240_at | NM_003890 | FC(γ)BP | IgG Fc binding protein |
| 527 | 203327_at | N22903 | | insulin-degrading enzyme |
| 528 | 203355_s_at | NM_015310 | KIAA0942 | KIAA0942 protein |
| 529 | 203407_at | NM_002705 | PPL | Periplakin |
| 530 | 203408_s_at | NM_002971 | SATB1 | special AT-rich sequence binding |
| | | | | protein 1 |
| 531 | 203430_at | NM_014320 | SOUL | putative heme-binding protein |
| 532 | 203453_at | NM_001038 | SCNN1A | Na channel, nonvoltage-gated 1 α |
| 533 | 203485_at | NM_021136 | RTN1 | reticulon 1 |
| 534 | 203549_s_at | NM_000237 | LPL | lipoprotein lipase |
| 535 | 203571_s_at | NM_006829 | APM2 | adipose specific 2 |
| 536 | 203585_at | NM_007150 | ZNF185 | zinc finger protein 185 (LIM domain) |
| 537 | 203636_at | BE967532 | MID1 | midline 1 (OpitzBBB syndrome) |
| 538 | 203637_s_at | NM_000381 | MID1 | |
| 539 | 203638_s_at | NM_022969 | FGFR2 | FGF receptor 2 transcript var 2 |
| 540 | 203678_at | NM_014967 | KIAA1018 | KIAA1018 protein |
| 541 | 203687_at | NM_002996 | SCYD1 | small inducible cytokine subfam D |
| | | | | (Cys-X3-Cys) mem 1 |
| 542 | 203726_s_at | NM_000227 | LAMA3 | laminin, alpha 3 |
| 543 | 203786_s_at | NM_003287 | TPD52L1 | tumor protein D52-like 1 |
| 544 | 203797_at | AF039555 | VSNL1 | visinin-like protein 1 |
| 545 | 203799_at | NM_014880 | KIAA0022 | KIAA0022 gene product |
| 546 | 203812_at | AB011538 | | MEGF5 |
| 547 | 203881_s_at | NM_004010 | | dystrophin transcript variant Dp427p2 |
| 548 | 203910_at | NM_004815 | PARG1 | PTPL1-associated RhoGAP 1 |
| 549 | 203917_at | NM_001338 | CXADR | coxsackie virus and adenovirus |
| | | | | receptor |
| 550 | 203961_at | AL157398 | NEBL | nebulette protein |
| 551 | 203962_s_at | NM_006393 | NEBL | |
| 552 | 203963_at | NM_001218 | CA12 | carbonic anhydrase XII |
| 553 | 203992_s_at | AF000992 | UTX | ubiquitous TPR motif, X isoform |
| | | | | alternative transcript 1 |
| 554 | 203997_at | NM_002829 | PTPN3 | protein tyrosine phosphatase, non- |
| | | | | receptor type 3 |
| 555 | 204005_s_at | NM_002583 | PAWR | PRKC, apoptosis, WT1, regulator |
| 556 | 204019_s_at | NM_015677 | | hypothetical protein DKFZP586F1318 |
| 557 | 204036_at | AW269335 | | endothelial differentiation, |
| | | | | lysophosphatidic acid G-protein- |
| | | | | coupled receptor, 2 |
| 558 | 204037_at | AW269335 | | endothelial differentiation, |
| | | | | lysophosphatidic acid G-protein- |
| | | | | coupled receptor, 2 |
| 559 | 204042_at | AB020707 | | KIAA0900 protein |
| 560 | 204058_at | AL049699 | | clone 747H23 on chrom 6q13-15 |
| 561 | 204059_s_at | NM_002395 | ME1 | malic enzyme 1, NADP(+)-dependent, |
| | | | | cytosolic |
| 562 | 204072_s_at | NM_023037 | 13CDNA73 | putative gene product |
| 563 | 204112_s_at | NM_006895 | HNMT | histamine N-methyltransferase |
| 564 | 204135_at | NM_014890 | DOC1 | downregulated in ovarian cancer 1 |
| 565 | 204136_at | NM_000094 | COL7A1 | collagen, type VII, alpha 1 |
| 566 | 204151_x_at | NM_001353 | AKR1C1 | aldo-keto reductase family 1, mem C1 |
| 567 | 204154_at | NM_001801 | CDO1 | cysteine dioxygenase, type I |
| 568 | 204168_at | NM_002413 | MGST2 | microsomal glutathione S-transferase 2 |
| 569 | 204201_s_at | NM_006264 | PTPN13 | protein tyrosine phosphatase, non- |
| | | | | receptor type 13 |
| 570 | 204204_at | NM_001860 | SLC31A2 | solute carrier family 31 member 2 |
| 571 | 204224_s_at | NM_000161 | GCH1 | GTP cyclohydrolase 1 |
| 572 | 204254_s_at | NM_000376 | VDR | vitamin D receptor |
| 573 | 204345_at | NM_001856 | COL16A1 | collagen, type XVI, alpha 1 |
| 574 | 204351_at | NM_005980 | S100P | S100 calcium-binding protein P |
| 575 | 204359_at | NM_013231 | FLRT2 | fibronectin leucine rich |
| | | | | transmembrane protein 2 |
| 576 | 204363_at | NM_001993 | F3 | coagulation factor III |
| 577 | 204379_s_at | NM_000142 | FGFR3 | fibroblast growth factor receptor 3 |
| 578 | 204388_s_at | NM_000240 | MAOA | monoamine oxidase A |
| 579 | 204389_at | NM_000240 | MAOA | monoamine oxidase A |
| 580 | 204400_at | NM_005864 | EFS2 | signal transduction protein |
| 581 | 204421_s_at | M27968 | FGF | basic fibroblast growth factor |
| 582 | 204422_s_at | NM_002006 | FGF2 | fibroblast growth factor 2 (basic) |
| 583 | 204424_s_at | AL050152 | | neuronal specific transcription factor |
| | | | | DAT1 |
| 584 | 204455_at | NM_001723 | BPAG1 | bullous pemphigold antigen 1 |
| 585 | 204503_at | NM_001988 | EVPL | envoplakin |
| 586 | 204517_at | BE962749 | cyclophilin C | peptidylprolyl isomerase C |
| 587 | 204519_s_at | NM_015993 | LOC51090 | plasmolipin |
| 588 | 204537_s_at | NM_004961 | GABRE | gamma-aminobutyric acid A receptor, |
| | | | | epsilon transcript variant 1 |
| 589 | 204591_at | NM_006614 | CHL1 | cell adhesion molecule with homology |
| | | | | to L1CAM |
| 590 | 204600_at | NM_004443 | EPHB3 | EphB3 |
| 591 | 204671_s_at | BE677131 | | KIAA0957 protein |
| 592 | 204675_at | NM_001047 | SRD5A1 | steroid-5-α-reductase, α polypeptide 1 |
| 593 | 204718_at | NM_004445 | EPHB6 | EphB6 |
| 594 | 204719_at | NM_007168 | ABCA8 | ATP-binding cassette, sub-fam A |
| | | | | mem 8 |
| 595 | 204734_at | NM_002275 | KRT15 | keratin 15 |
| 596 | 204749_at | NM_004538 | NAP1L3 | nucleosome assembly protein 1-like 3 |
| 597 | 204753_s_at | AI810712 | | hepatic leukemia factor |
| 598 | 204754_at | AI810712 | | hepatic leukemia factor |
| 599 | 204755_x_at | M95585 | HLF | leukemia factor |
| 600 | 204765_at | NM_005435 | ARHGEF5 | Rho guanine nucleotide exchange |
| | | | | factor 5 |
| 601 | 204773_at | NM_004512 | IL11RA | interleukin 11 receptor, alpha |
| 602 | 204773_at | NM_004512 | IL11RA | |
| 603 | 204855_at | NM_002639 | SERPINB5 | serine (or cysteine) proteinase |
| | | | | inhibitor, clade B, member 5 |
| 604 | 204872_at | NM_007005 | BCE-1 | BCE-1 protein |
| 605 | 204937_s_at | NM_016325 | ZNF274 | zinc finger protein 274 |
| 606 | 204942_s_at | NM_000695 | ALDH3B2 | aldehyde dehydrogenase 3 fam mem |
| | | | | B2 |
| 607 | 204952_at | NM_014400 | C4.4A | GPI-anchored metastasis-associated |
| | | | | protein homolog |
| 608 | 204971_at | NM_005213 | CSTA | cystatin A (stefin A) |
| 609 | 204975_at | NM_001424 | EMP2 | epithelial membrane protein 2 |
| 610 | 204990_s_at | NM_000213 | ITGB4 | integrin, beta 4 |
| 611 | 205014_at | NM_005130 | HBP17 | heparin-binding growth factor binding |
| 612 | 205019_s_at | NM_004624 | VIPR1 | vasoactive intestinal pep receptor 1 |
| 613 | 205081_at | NM_001311 | CRIP1 | cysteine-rich protein 1 (intestinal) |
| 614 | 205109_s_at | NM_015320 | ARHGEF4 | Rho guanine nucleotide exchange |
| | | | | factor (GEF) 4 |
| 615 | 205128_x_at | NM_000962 | PTGS1 | prostaglandin-endoperoxide synthase 1 |
| 616 | 205185_at | NM_006846 | SPINK5 | serine protease inhibitor, Kazal t, 5 |
| 617 | 205200_at | NM_003278 | TNA | tetranectin |
| 618 | 205206_at | NM_000216 | KAL1 | Kallmann syndrome 1 sequence |
| 619 | 205236_x_at | NM_003102 | SOD3 | superoxide dismutase 3, extracellular |
| 620 | 205251_at | NM_022817 | PER2 | period homolog 2 transcript variant 1 |
| 621 | 205259_at | NM_000901 | NR3C2 | nuclear receptor subfamily 3, group |
| | | | | C, member 2 |
| 622 | 205286_at | U85658 | | transcription factor ERF-1 |
| 623 | 205349_at | NM_002068 | GNA15 | guanine nucleotide binding protein, α 15 |
| 624 | 205363_at | NM_003986 | BBOX1 | butyrobetaine (γ), 2-oxoglutarate |
| | | | | dioxygenase 1 |
| 625 | 205382_s_at | NM_001928 | DF | D component of complement (adipsin) |
| 626 | 205384_at | NM_005031 | FXYD1 | FXYD domain-containing ion |
| | | | | transport regulator 1 variant a |
| 627 | 205403_at | NM_004633 | IL1R2 | interleukin 1 receptor, type II |
| 628 | 205404_at | NM_005525 | HSD11B1 | hydroxysteroid dehydrogenase 1 |
| 629 | 205407_at | NM_021111 | RECK | reversion-inducing-cysteine-rich |
| | | | | protein with kazal motifs |
| 630 | 205440_s_at | NM_000909 | NPY1R | neuropeptide Y receptor Y1 |
| 631 | 205455_at | NM_002447 | MST1R | macrophage stimulating 1 receptor |
| 632 | 205464_at | NM_000336 | SCNN1B | Na channel, nonvoltage-gated 1, β |
| 633 | 205470_s_at | NM_006853 | KLK11 | kallikrein 11 |
| 634 | 205490_x_at | BF060667 | connexin 31 | gap junction protein, beta 3, 31 kD |
| 635 | 205498_at | NM_000163 | GHR | growth hormone receptor |
| 636 | 205559_s_at | NM_006200 | PCSK5 | proprotein convertase subtilisinkexin |
| | | | | type 5 |
| 637 | 205560_at | NM_006200 | PCSK5 | |
| 638 | 205569_at | NM_014398 | TSC403 | similar to lysosome-associated |
| | | | | membrane glycoprotein |
| 639 | 205613_at | NM_016524 | LOC51760 | BK protein |
| 640 | 205668_at | NM_002349 | LY75 | lymphocyte antigen 75 |
| 641 | 205672_at | NM_000380 | XPA | xeroderma pigmentosum, |
| | | | | complementation group A |
| 642 | 205709_s_at | NM_001263 | CDS1 | CDP-diacylglycerol synthase 1 |
| 643 | 205730_s_at | NM_014945 | KIAA0843 | KIAA0843 protein |
| 644 | 205765_at | NM_000777 | CYP3A5 | cyt P450, subfam IIIA, polypep 5 |
| 645 | 205807_s_at | NM_020127 | TUFT1 | tuftelin 1 |
| 646 | 205857_at | AI269290 | | solute carrier family 18, member 2 |
| 647 | 205883_at | NM_006006 | ZNF145 | zinc finger protein 145 |
| 648 | 205900_at | NM_006121 | KRT1 | keratin 1 |
| 649 | 205933_at | NM_015559 | KIAA0437 | KIAA0437 protein |
| 650 | 205977_s_at | NM_005232 | EPHA1 | EphA1 |
| 651 | 206032_at | AI797281 | | est:we86g02.x1 |
| 652 | 206033_s_at | NM_001941 | DSC3 | desmocollin 3 transcript variant Dsc3a |
| 653 | 206068_s_at | AI367275 | | acyl-Coenzyme A dehydrogenase, long chain |
| 654 | 206093_x_at | NM_007116 | TNXA | tenascin XA |
| 655 | 206122_at | NM_006942 | SOX20 | SRY-box 20 |
| 656 | 206149_at | NM_022097 | LOC63928 | hepatocellular carcinoma antigen |
| | | | | gene 520 |
| 657 | 206170_at | NM_000024 | ADRB2 | adrenergic, beta-2-, receptor, surface |
| 658 | 206192_at | L20815 | | S protein |
| 659 | 206201_s_at | NM_005924 | MEOX2 | mesenchyme homeo box 2 |
| 660 | 206276_at | NM_003695 | E48 | lymphocyte antigen 6 camp locus D |
| 661 | 206315_at | NM_004750 | CRLF1 | cytokine receptor-like factor 1 |
| 662 | 206363_at | NM_005360 | MAF | v-maf musculoaponeurotic |
| | | | | fibrosarcoma oncogene homolog |
| 663 | 206385_s_at | NM_020987 | ANK3 | ankyrin 3, node of Ranvier, tran var 1 |
| 664 | 206400_at | NM_002307 | LGALS7 | lectin, galactoside-binding, soluble, 7 |
| 665 | 206453_s_at | NM_016250 | NDRG2 | N-myc downstream-regulated gene 2 |
| 666 | 206481_s_at | NM_001290 | LDB2 | LIM domain binding 2 |
| 667 | 206482_at | NM_005975 | PTK6 | PTK6 protein tyrosine kinase 6 |
| 668 | 206515_at | NM_000896 | CYP4F3 | cyt P450, subfam IVF, polypeptide 3 |
| 669 | 206539_s_at | NM_023944 | CYP4F12 | cytochrome P450 isoform 4F12 |
| 670 | 206581_at | NM_001717 | BNC | basonuclin |
| 671 | 206637_at | NM_014879 | KIAA0001 | KIAA0001 gene product |
| 672 | 206655_s_at | NM_000407 | GP1BB | glycoprotein lb (platelet), β polypep |
| 673 | 206693_at | NM_000880 | IL7 | interleukin 7 |
| 674 | 206884_s_at | NM_003843 | SCEL | sciellin |
| 675 | 207002_s_at | NM_002656 | PLAGL1 | pleiomorphic adenoma gene-like 1 |
| 676 | 207023_x_at | NM_000421 | KRT10 | keratin 10 |
| 677 | 207076_s_at | NM_000050 | ASS | argininosuccinate synthetase |
| 678 | 207121_s_at | NM_002748 | MAPK6 | mitogen-activated protein kinase 6 |
| 679 | 207655_s_at | NM_013314 | SLP65 | B cell linker protein |
| 680 | 207720_at | NM_000427 | LOR | loricrin |
| 681 | 207761_s_at | NM_014033 | | DKFZP586A0522 protein |
| 682 | 207843_x_at | NM_001914 | CYB5 | cytochrome b-5 |
| 683 | 207908_at | NM_000423 | KRT2A | keratin 2A |
| 684 | 207943_x_at | NM_006718 | PLAGL1 | pleiomorphic adenoma gene-like |
| | | | | transcript variant 2 |
| 685 | 207955_at | NM_006664 | SCYA27 | small inducible cytokine subfamily A |
| | | | | (Cys—Cys), member 27 |
| 686 | 207996_s_at | NM_004338 | C18ORF1 | chrom 18 open reading frame 1 |
| 687 | 208096_s_at | NM_030520 | | hypothetical protein DKFZp564B052 |
| 688 | 208146_s_at | NM_031311 | LOC54504 | serine carboxypeptidase vitellogenic- |
| | | | | like |
| 689 | 208161_s_at | NM_020037 | ABCC3 | ATP-binding cassette sub-fam C mem 3 |
| 690 | 208190_s_at | NM_015925 | LISCH7 | liver-specific bHLH-Zip transcription |
| | | | | factor |
| 691 | 208228_s_at | M87771 | K-sam-III | secreted FGF receptor |
| 692 | 208609_s_at | NM_019105 | TNXB | tenascin XB |
| 693 | 208614_s_at | M62994 | | thyrold autoantigen |
| 694 | 208651_x_at | M58664 | | CD24 signal transducer |
| 695 | 208690_s_at | BC000915 | | Similar to LIM protein, |
| 696 | 208798_x_at | AF204231 | GM88 | 88-kDa Golgi protein |
| 697 | 209047_at | AL518391 | | aquaporin 1 |
| 698 | 209159_s_at | AV724216 | | NDRG family, member 4 |
| 699 | 209160_at | AB018580 | hluPGFS | aldo-keto reductase family 1, mem C3 |
| 700 | 209211_at | AF132818 | CKLF | colon Kruppel-like factor |
| 701 | 209212_s_at | AB030824 | | transcription factor BTEB2 |
| 702 | 209289_at | AI700518 | | nuclear factor IB |
| 703 | 209290_s_at | BC001283 | | Similar to nuclear factor IB, |
| 704 | 209309_at | D90427 | | zinc-alpha2-glycoprotein |
| 705 | 209318_x_at | BG547855 | | pleiomorphic adenoma gene-like 1 |
| 706 | 209335_at | AI281593 | | decorin |
| 707 | 209348_s_at | AF055376 | c-maf | short form transcription factor C-MAF |
| 708 | 209351_at | BC002690 | | keratin 14 |
| 709 | 209357_at | AF109161 | MRG1 | p35srj |
| 710 | 209366_x_at | M22865 | | cytochrome b5 |
| 711 | 209368_at | AF233336 | EPHX2 | soluble epoxide hydrolase |
| 712 | 209386_at | AI346835 | | transmembrane 4 superfam mem 1 |
| 713 | 209392_at | L35594 | autotaxin | ectonucleotide |
| | | | | pyrophosphatasephosphodiesterase 2 |
| 714 | 209465_x_at | AL565812 | | pleiotrophin |
| 715 | 209493_at | AF338650 | AIPC | PDZ domain-containing protein AIPC |
| 716 | 209540_at | NM_000618 | somatomedin C | insulin-like growth factor 1 |
| 717 | 209550_at | U35139 | | NECDIN related protein |
| 718 | 209558_s_at | AB013384 | HIP1R | huntingtin interacting protein-1-related |
| 719 | 209590_at | AL157414 | | clone RP11-560A15 on chrom 20 |
| 720 | 209602_s_at | AI796169 | | GATA-binding protein 3 |
| 721 | 209603_at | AI796169 | | GATA-binding protein 3 |
| 722 | 209604_s_at | BC003070 | | GATA-binding protein 3, clone |
| | | | | MGC: 2346 |
| 723 | 209605_at | D87292 | rhodanese | thiosulfate sulfurtransferase |
| 724 | 209656_s_at | AL136550 | | DKFZp761J17121 |
| 725 | 209679_s_at | BC003379 | | hyp protein from clone 643, clone |
| | | | | MGC: 5115 |
| 726 | 209684_at | AL136924 | | DKFZp586G2120 |
| 727 | 209687_at | U19495 | hIRH | intercrine-alpha |
| 728 | 209691_s_at | BC003541 | FLJ10488 | hypothetical protein FLJ10488 |
| 729 | 209699_x_at | U05598 | | dihydrodlol dehydrogenase |
| 730 | 209732_at | NM_005127 | | Sim to C-type lectin, superfam mem 2 |
| 731 | 209763_at | AL049176 | | clone 141H5 on chrom Xq22.1-23 |
| 732 | 209771_x_at | AA761181 | | CD24 antigen |
| 733 | 209863_s_at | AF091627 | | CUSP |
| 734 | 209866_s_at | R50822 | | KIAA0768 protein |
| 735 | 209975_at | AF182276 | CYP2E1 | cytochrome P450-2E1 |
| 736 | 210059_s_at | BC000433 | | mitogen-activated protein kinase 13 |
| 737 | 210096_at | J02871 | | lung cytochrome P450 BI |
| 738 | 210128_s_at | U41070 | | P2 purinergic receptor |
| 739 | 210298_x_at | AF098518 | FHL1 | 4 and ½ LIM domains 1 protein isoform B |
| 740 | 210347_s_at | AF080216 | | C2H2-type zinc-finger protein |
| 741 | 210372_s_at | AF208012 | TPD52L2 | tumor protein D52-like 2 |
| 742 | 210397_at | U73945 | | beta-defensin-1 |
| 743 | 210619_s_at | AF173154 | HYAL1 | hyaluronoglucosaminidase 1 isof 2 |
| 744 | 210633_x_at | M19156 | KRT10 | acidic keratin-10 |
| 745 | 210715_s_at | AF027205 | kop | Kunitz-type protease inhibitor |
| 746 | 210880_s_at | AB001467 | Efs2 | |
| 747 | 210958_s_at | BC003646 | | clone MGC: 4693 |
| 748 | 211043_s_at | BC006332 | Lcb | clathrin, light polypeptide |
| 749 | 211105_s_at | U80918 | NF-ATcC | transcrition factor |
| 750 | 211382_s_at | AF220152 | TACC2 | transforming, acidic coiled-coil |
| | | | | containing protein 2 |
| 751 | 211458_s_at | AF180519 | | GABA-A receptor-associated |
| 752 | 211596_s_at | AB050468 | | membrane glycoprotein LIG-1 |
| 753 | 211597_s_at | AB059408 | SMAP31-12 | |
| 754 | 211653_x_at | M33376 | | pseudo-chlordecone reductase |
| 755 | 211712_s_at | BC005830 | | clone MGC: 1925 |
| 756 | 211734_s_at | BC005912 | | Fc fragment IgE, high affinity I, rec for α |
| | | | | polypep |
| 757 | 211841_s_at | U94510 | | lymphocyte associated receptor of |
| | | | | death 9, alternatively spliced |
| 758 | 211986_at | BG287862 | desmoyokin | AHNAK nucleoprotein |
| 759 | 212148_at | BF967998 | | FLJ12900 fis, |
| 760 | 212204_at | AF132733 | | DKFZP564G2022 protein |
| 761 | 212242_at | AL565074 | | tubulin, alpha 1 (testis specific) |
| 762 | 212327_at | AK027231 | | FLJ23578 fis, KIAA1102 protein |
| 763 | 212328_at | AK027231 | | FLJ23578 fis, KIAA1102 protein |
| 764 | 212390_at | AB007923 | | KIAA0477 gene product |
| 765 | 212538_at | AL576253 | | KIAA1058 protein |
| 766 | 212543_at | U83115.1 | | non-lens β gamma-crystallin like |
| 767 | 212589_at | BG168858 | | oncogene TC21 |
| 768 | 212593_s_at | N92498 | | FLJ22071 fis, clone HEP11691 |
| 769 | 212724_at | BG054844 | | ras homolog gene family, member E |
| 770 | 212741_at | AA923354 | | monoamine oxidase A |
| 771 | 212823_s_at | AU147160 | | KIAA0599 protein |
| 772 | 212841_s_at | AI692180 | | PTPRF interacting protein, binding |
| | | | | protein 2 |
| 773 | 212850_s_at | AA584297 | | low density lipoprotein receptor-related |
| | | | | protein 4 |
| 774 | 212875_s_at | AP001745 | | chrom 21 open reading frame 25 |
| 775 | 212992_at | AI935123 | | ESTs |
| 776 | 213029_at | AL110126 | | DKFZp564H1916 |
| 777 | 213032_at | AL110126 | | DKFZp564H1916 |
| 778 | 213050_at | AA594937 | | KIAA0633 protein |
| 779 | 213068_at | AI146848 | | dermatopontin |
| 780 | 213071_at | AI146848 | | dermatopontin |
| 781 | 213106_at | AI769688 | | 23664 and 23905 mRNA sequence |
| 782 | 213110_s_at | AW052179 | | collagen, type IV, alpha 5 |
| 783 | 213122_at | AI096375 | | KIAA1750 protein, partial cds |
| 784 | 213135_at | U90902 | | clone 23612 |
| 785 | 213194_at | BF059159 | | Hs.301198 roundabout homolog |
| 786 | 213227_at | BE879873 | | progesterone membrane binding |
| 787 | 213280_at | AK000478 | | FLJ20471 fis |
| 788 | 213285_at | AV691491 | | DKFZp564D1462 |
| 789 | 213287_s_at | X14487 | | acidic (type I) cytokeratin 10 |
| 790 | 213353_at | BF693921 | | ATP-binding cassette, sub-family A, |
| | | | | member 5 |
| 791 | 213359_at | W74620 | | heterogenous nuclear |
| | | | | ribonucleoprotein D |
| 792 | 213369_at | AI825832 | | DKFZp434A132 |
| 793 | 213375_s_at | N80918 | | Novel gene mapping to chomo 13 |
| 794 | 213397_x_at | AI761728 | | DnaJ homolog, subfam C, mem 8 |
| 795 | 213451_x_at | BE044614 | | tenascin XB |
| 796 | 213456_at | AI927000 | | DKFZP564D206 |
| 797 | 213506_at | BE965369 | | proteinase activated receptor-2 |
| 798 | 213556_at | BE673445 | | chromosome 19, cosmid R28379 |
| 799 | 213618_at | AB011152 | | KIAA0580 |
| 800 | 213695_at | L48516 | PON3 | paraoxonase 3 |
| 801 | 213707_s_at | NM_005221 | DLX5 | distal-less homeo box 5 |
| 802 | 213725_x_at | AI693140 | | DKFZp586F071 |
| 803 | 213737_x_at | AI620911 | | |
| 804 | 213800_at | X04697 | | complement factor H 38-kDa N-term |
| 805 | 213817_at | AL049435 | | DKFZp586B0220 |
| 806 | 213820_s_at | T54159 | | hypothetical protein MGC10327 |
| 807 | 213844_at | NM_019102 | HOXA5 | homeo box A5 |
| 808 | 213848_at | AI655015 | | DKFZp586F2224 |
| 809 | 213891_s_at | AI927067 | | FLJ11918 fis |
| 810 | 213924_at | BF476502 | | hypothetical protein FLJ11585 |
| 811 | 213929_at | AL050204 | | DKFZp586F1223 |
| 812 | 213933_at | AW242315 | | DKFZp586M0723 |
| 813 | 213935_at | AF007132 | | clone 23551 |
| 814 | 213942_at | AL134303 | | DKFZp547K034_r1 |
| 815 | 213992_at | AI889941 | | collagen, type IV, alpha 6 |
| 816 | 213994_s_at | AI885290 | | spondin 1, extracellular matrix |
| 817 | 214058_at | M19720 | | L-myc protein |
| 818 | 214132_at | BG232034 | | ATP synthase, H+ transporting, |
| | | | | mitochondrial F1 complex, gamma |
| | | | | polypeptide 1 |
| 819 | 214164_x_at | BF752277 | | adaptor-related protein complex 1, |
| | | | | gamma 1 subunit |
| 820 | 214234_s_at | X90579 | | cyp related pseudogene |
| 821 | 214235_at | X90579 | | cyp related pseudogene |
| 822 | 214247_s_at | AU148057 | | regulated in glioma |
| 823 | 214598_at | AL049977 | | DKFZp564C122 |
| 824 | 214696_at | AF070569 | | clone 24659 |
| 825 | 214753_at | AW084068 | | BRCA2 region |
| 826 | 214823_at | AF033199 | | C2H2 zinc finger protein pseudogene |
| 827 | 215034_s_at | AI189753 | | FLJ13302 fis |
| 828 | 215062_at | AL390143 | | DKFZp547N074 |
| 829 | 215129_at | AJ000008 | | C2 domain containing PI3-kinase |
| 830 | 215239_x_at | AU132789 | | zinc finger protein 273 |
| 831 | 215243_s_at | AF099730 | GJB3 | connexin 31 |
| 832 | 215388_s_at | X56210 | FHR-1 | complement Factor H-related 1 |
| 833 | 215513_at | AF241534 | HYMAI | hydatidiform mole assoc & imprinted |
| 834 | 215516_at | AC005048 | | BAC clone CTB-15P3 fr 7q22-q31.2 |
| 835 | 215536_at | | | DMA, DMB, HLA-Z1, IPP2, LMP2, |
| | | | | TAP1, LMP7, TAP2, DOB, DQB2 AND |
| | | | | RING8, 9, 13 and 14 genes |
| 836 | 215659_at | AK025174 | | FLJ21521 |
| 837 | 215704_at | AL356504 | | clone RP1-14N1 chrom 1q21.1-21.3 |
| 838 | 215726_s_at | M22976 | | cytochrome b5 |
| 839 | 215867_x_at | AL050025 | | DKFZp564D066 |
| 840 | 216199_s_at | AL109942 | | clone RP3-473J16 chrom 6q25.3-26 |
| 841 | 216268_s_at | U77914 | | soluble protein Jagged |
| 842 | 216333_x_at | M25813 | | unidentified gene complementary to |
| | | | | P450c21 |
| 843 | 216379_x_at | AK000168 | | CD24 signal transducer |
| 844 | 216594_x_at | S68290 | | chlordecone reductase homolog |
| 845 | 216699_s_at | L10038 | | pre-pro-protein for kallikrein |
| 846 | 217087_at | AF005081 | xp32 | skin-specific protein |
| 847 | 217528_at | BF003134 | | ESTs |
| 848 | 217707_x_at | AI535683 | | ESTs |
| 849 | 217901_at | BF031829 | | desmoglein 2 |
| 850 | 217961_at | NM_017875 | FLJ20551 | hypothetical protein FLJ20551 |
| 851 | 218002_s_at | NM_004887 | SCYB14 | small inducible cytokine subfamily B |
| | | | | (Cys-X-Cys), member 14 |
| 852 | 218170_at | NM_016048 | LOC51015 | CGI-111 protein |
| 853 | 218180_s_at | NM_022772 | FLJ21935 | hypothetical protein FLJ21935 |
| 854 | 218186_at | NM_020387 | CATX-8 | CATX-8 protein |
| 855 | 218237_s_at | NM_030674 | ATA1 | amino acid transporter system A1 |
| 856 | 218326_s_at | NM_018490 | GPR48 | G protein-coupled receptor 48 |
| 857 | 218434_s_at | NM_023928 | | hypothetical protein FLJ12389 |
| 858 | 218451_at | NM_022842 | | hypothetical protein FLJ22969 |
| 859 | 218499_at | NM_016542 | LOC51765 | serinethreonine protein kinase MASK |
| 860 | 218546_at | NM_024709 | | hypothetical protein FLJ14146 |
| 861 | 218552_at | NM_018281 | | hypothetical protein FLJ10948 |
| 862 | 218603_at | NM_016217 | LOC51696 | hHDC for homolog of Dros headcase |
| 863 | 218644_at | NM_016445 | PLEK2 | pleckstrin 2 (mouse) homolog |
| 864 | 218651_s_at | NM_018357 | | hypothetical protein FLJ11196 |
| 865 | 218657_at | NM_016339 | LOC51195 | Link guanine nucleotide exchange |
| | | | | factor II |
| 866 | 218675_at | NM_020372 | LOC57100 | organic cation transporter |
| 867 | 218677_at | NM_020672 | LOC57402 | S100-type calcium binding protein A14 |
| 868 | 218692_at | NM_017786 | | hypothetical protein FLJ20366 |
| 869 | 218704_at | NM_017763 | | hypothetical protein FLJ20315 |
| 870 | 218718_at | NM_016205 | PDGFC | platelet derived growth factor C |
| 871 | 218736_s_at | NM_017734 | | hypothetical protein FLJ20271 |
| 872 | 218751_s_at | NM_018315 | | hypothetical protein FLJ11071 |
| 873 | 218764_at | NM_024064 | | hypothetical protein MGC5363 |
| 874 | 218792_s_at | NM_017688 | | hypothetical protein FLJ20150 |
| 875 | 218796_at | NM_017671 | | hypothetical protein FLJ20116 |
| 876 | 218804_at | NM_018043 | | hypothetical protein FLJ10261 |
| 877 | 218806_s_at | AF118887 | VAV-3 | VAV-3 protein |
| 878 | 218807_at | NM_006113 | VAV3 | vav 3 oncogene |
| 879 | 218816_at | NM_018214 | | hypothetical protein FLJ10775 |
| 880 | 218820_at | NM_020215 | | hypothetical protein DKFZp761F2014 |
| 881 | 218849_s_at | NM_006663 | RAI | RelA-associated inhibitor |
| 882 | 218854_at | NM_013352 | SART-2 | squamous cell carcinoma antigen recog |
| | | | | by T cell |
| 883 | 218901_at | NM_020353 | LOC57088 | phospholipid scramblase 4 |
| 884 | 218919_at | NM_024699 | | hypothetical protein FLJ14007 |
| 885 | 218963_s_at | NM_015515 | | DKFZP434G032 protein |
| 886 | 219010_at | NM_018265 | | hypothetical protein FLJ10901 |
| 887 | 219054_at | NM_024563 | | hypothetical protein FLJ14054 |
| 888 | 219064_at | NM_030569 | | hypothetical protein MGC10848 |
| 889 | 219073_s_at | NM_017784 | | hypothetical protein FLJ20363 |
| 890 | 219090_at | NM_020689 | NCKX3 | sodium calcium exchanger |
| 891 | 219093_at | NM_017933 | | hypothetical protein FLJ20701 |
| 892 | 219095_at | NM_005090 | PLA2G4B | phospholipase A2, group IVB |
| 893 | 219109_at | NM_024532 | | hypothetical protein FLJ22724 |
| 894 | 219115_s_at | NM_014432 | IL20RA | interleukin 20 receptor, alpha |
| 895 | 219229_at | NM_013272 | SLC21A11 | solute carrier family 21, member 11 |
| 896 | 219232_s_at | NM_022073 | | hypothetical protein FLJ21620 |
| 897 | 219263_at | NM_024539 | | hypothetical protein FLJ23516 |
| 898 | 219298_at | NM_024693 | | hypothetical protein FLJ20909 |
| 899 | 219313_at | NM_017577 | | hypothetical protein DKFZp434C0328 |
| 900 | 219368_at | NM_021963 | NAP1L2 | nucleosome assembly protein 1-like 2 |
| 901 | 219388_at | NM_024915 | | hypothetical protein FLJ13782 |
| 902 | 219395_at | NM_024939 | | hypothetical protein FLJ21918 |
| 903 | 219410_at | NM_018004 | | hypothetical protein FLJ10134 |
| 904 | 219411_at | NM_024712 | | hypothetical protein FLJ13824 |
| 905 | 219423_x_at | NM_003790 | TNFRSF12 | TNF receptor superfamily, member 12 |
| 906 | 219436_s_at | NM_016242 | LOC51705 | endomucin-2 |
| 907 | 219461_at | AJ236915 | | pak5 protein |
| 908 | 219476_at | NM_024115 | | hypothetical protein MGC4309 |
| 909 | 219489_s_at | NM_017821 | | hypothetical protein FLJ20435 |
| 910 | 219497_s_at | NM_022893 | BCL11A | B-cell CLLlymphoma 11A |
| 911 | 219518_s_at | NM_025165 | | hypothetical protein FLJ22637 |
| 912 | 219528_s_at | NM_022898 | BCL11B | B-cell lymphomaleukaemia 11B |
| 913 | 219532_at | NM_022726 | ELOVL4 | Stargardt disease 3 |
| 914 | 219597_s_at | NM_017434 | DUOX1 | dual oxidase 1 |
| 915 | 219689_at | NM_020163 | LOC56920 | semaphorin sem2 |
| 916 | 219729_at | NM_016307 | PRX2 | paired related homeobox protein |
| 917 | 219764_at | NM_007197 | FZD10 | frizzled (Drosophila) homolog 10 |
| 918 | 219806_s_at | NM_020179 | FN5 | FN5 protein |
| 919 | 219825_at | NM_019885 | P450RAI-2 | cyt P450 retinoid metabolizing |
| 920 | 219908_at | NM_014421 | DKK2 | dickkopf homolog 2 |
| 921 | 219936_s_at | NM_023915 | GPR87 | G protein-coupled receptor 87 |
| 922 | 219938_s_at | NM_024430 | PSTPIP2 | proline-serine-threonine phosphatase |
| | | | | interacting protein 2 |
| 923 | 219970_at | NM_017655 | | hypothetical protein FLJ20075 |
| 924 | 219976_at | NM_015888 | HOOK1 | hook1 protein |
| 925 | 219995_s_at | NM_024702 | | hypothetical protein FLJ13841 |
| 926 | 219998_at | NM_014181 | | HSPC159 protein |
| 927 | 220016_at | NM_024060 | | hypothetical protein MGC5395 |
| 928 | 220056_at | NM_021258 | IL22R | interleukin 22 receptor |
| 929 | 220066_at | NM_022162 | NOD2 | NOD2 protein |
| 930 | 220076_at | NM_019847 | ANKH | ankylosis, progressive homolog |
| 931 | 220161_s_at | NM_019114 | EHM2 | EHM2 gene |
| 932 | 220225_at | NM_016358 | IRX4 | iroquois homeobox protein 4 |
| 933 | 220230_s_at | NM_016229 | LOC51700 | cytochrome b5 reductase b5R.2 |
| 934 | 220262_s_at | NM_023932 | | hypothetical protein MGC2487 |
| 935 | 220266_s_at | NM_004235 | KLF4 | Kruppel-like factor 4 (gut) |
| 936 | 220289_s_at | NM_017977 | | hypothetical protein FLJ10040 |
| 937 | 220318_at | NM_017957 | FLJ20778 | epsin 3 |
| 938 | 220413_at | NM_014579 | ZIP2 | zinc transporter |
| 939 | 220414_at | NM_017422 | CLSP | calmodulin-like skin protein |
| 940 | 220428_at | NM_015717 | LANGERIN | Langerhans cell specific c-type lectin |
| 941 | 220432_s_at | NM_016593 | CYP39A1 | oxysterol 7alpha-hydroxylase |
| 942 | 220518_at | NM_024801 | | hypothetical protein FLJ21551 |
| 943 | 220625_s_at | AF115403 | | Ets transcription factor ESE-2b |
| 944 | 220723_s_at | NM_025087 | | hypothetical protein FLJ21511 |
| 945 | 220724_at | NM_025087 | | hypothetical protein FLJ21511 |
| 946 | 220911_s_at | NM_025081 | | KIAA1305 protein |
| 947 | 220945_x_at | NM_018050 | | hypothetical protein FLJ10298 |
| 948 | 221127_s_at | NM_006394 | RIG | regulated in glioma |
| 949 | 221215_s_at | NM_020639 | ANKRD3 | ankyrin repeat domain 3 |
| 950 | 221541_at | AL136861 | | DKFZp434B044 |
| 951 | 221667_s_at | AF133207 | | protein kinase H11 |
| 952 | 221747_at | AL046979 | | DKFZp586K0617 |
| 953 | 221748_s_at | AL046979 | | DKFZp586K0617 |
| 954 | 221760_at | BG287153 | | mannosidase, α, class 1A, member 1 |
| 955 | 221796_at | AA707199 | | Similar to hyp protein FLJ20093 |
| 956 | 221841_s_at | BF514079 | | Kruppel-like factor 4 (gut) |
| 957 | 221854_at | AI378979 | | ESTs |
| 958 | 221922_at | AW195581 | | KIAA0761 |
| 959 | 221950_at | AI478455 | | empty spiracles homolog 2 |
| 960 | 222043_at | AI982754 | | clusterin |
| 961 | 222102_at | NM_000847 | GSTA3 | glutathione S-transferase A3 |
| 962 | 222236_s_at | AK000253 | | FLJ20246 fis |
| 963 | 222256_s_at | AK000550 | | FLJ20543 fis |
| 964 | 222288_at | AI004009 | | ESTs |
| 965 | 222290_at | AA731709 | | ESTs |
| 966 | 222303_at | AV700891 | | ESTs |
| 967 | 266_s_at | L33930 | | CD24 signal transducer |
| 968 | 33322_i_at | X57348 | | clone 9112 |
| 969 | 33323_r_at | X57348 | | clone 9112 |
| 970 | 35666_at | U38276 | | semaphorin III family homolog |
| 971 | 38340_at | AB014555 | | KIAA0655 protein |
| 972 | 39248_at | N74607 | | za55a01.s1 |
| 973 | 40016_g_at | AB002301 | | KIAA0303 gene |
| 974 | 40093_at | X83425 | | LU gene Lutheran blood group |
| | | | | glycoprotein |
| 975 | 40472_at | AF007155 | | clone 23763 unknown mRNA |
| 976 | 57588_at | R62432 | | yg52e11.s1 |
| 977 | 60474_at | AA469071 | | ne17f11.s1 |
| 978 | 91826_at | AI219073 | | qg16e08.x1 |
| 979 | | | PBGD | |
| 980 | | | MART1 | |
| 981 | | | Me20m | |
| 982 | | | MAGE-3 | |
| 983 | | | | Me20m forward primer |
| 984 | | | | Me20m reverse primer |
| 985 | | | | Me20m probe |
| 986 | | | | PBGD forward primer |
| 987 | | | | PBGD reverse primer |
| 988 | | | | PBGD probe |
| 999 | | | | Tyrosinase |
| 1000 | | | | Tyrosinase Forward |
| 1001 | | | | Tyrosinase Reverse |
| 1002 | | | | Tyrosinase probe |
| 1003 | | | | MART1 Forward |
| 1004 | | | | MART1 Reverse |
| 1005 | | | | MART1 Probe |
| 1006 | | | | HMB45 Forward |
| 1007 | | | | gp100 Reverse |
| 1008 | | | | gp100 Probe |
| 1009 | | | | PLAB Forward |
| 1010 | | | | PLAB Reverse |
| 1011 | | | | PLAB Probe |

### REFERENCES CITED

[0135] W O 96/29430

[0136] 2003/0232356

[0137] 2002/0160382

[0138] 2002/0155480

[0139] 2002/0110820

[0140] 2002/0098535

[0141] 2003/0059431

[0142] 2003/0049701

[0143] 2002/0048784

[0144] 2003/014283

[0145] 2003/0013097

[0146] U.S. Pat. No. 6,500,919

[0147] U.S. Pat. No. 4,715,545

[0148] U.S. Pat. No. 5,210,015

[0149] U.S. Pat. No. 5,348,856

[0150] U.S. Pat. No. 5,411,876

[0151] U.S. Pat. No. 5,413,924

[0152] U.S. Pat. No. 5,487,972

[0153] U.S. Pat. No. 5,512,437

[0154] U.S. Pat. No. 5,512,444

[0155] U.S. Pat. No. 5,525,494

[0156] U.S. Pat. No. 5,550,044

[0157] U.S. Pat. No. 5,612,201

[0158] U.S. Pat. No. 5,759,783

[0159] U.S. Pat. No. 5,804,375

[0160] U.S. Pat. No. 5,844,075

[0161] U.S. Pat. No. 5,844,092

[0162] U.S. Pat. No. 5,872,225

[0163] U.S. Pat. No. 5,910,574

[0164] U.S. Pat. No. 5,969,124

[0165] U.S. Pat. No. 5,985,619

[0166] U.S. Pat. No. 5,994,102

[0167] U.S. Pat. No. 6,025,474

[0168] U.S. Pat. No. 6,057,105

[0169] U.S. Pat. No. 6,107,476

[0170] U.S. Pat. No. 6,153,388

[0171] U.S. Pat. No. 6,235,525

[0172] U.S. Pat. No. 6,291,430

[0173] U.S. Pat. No. 6,326,145

[0174] U.S. Pat. No. 6,338,947

[0175] U.S. Pat. No. 6,369,211

[0176] U.S. Pat. No. 6,403,341

[0177] U.S. Pat. No. 6,426,217

[0178] U.S. Pat. No. 6,465,181

[0179] U.S. Pat. No. 6,475,727

[0180] U.S. Pat. No. 6,500,638

[0181] U.S. Pat. No. 6,521,227

[0182] U.S. Pat. No. 6,527,560

[0183] U.S. Pat. No. 6,599,699

[0184] Abrahamsen et al. (2004) Quantification of melanoma mRNA markers in sentinel nodes: pre-clinical evaluation of a single-step real-time reverse transcriptase-polymerase chain reaction assay J Molec Diag 6:253-259

[0185] Abrahamsen et al. (2005) Pathologic assessment of melanoma sentinel nodes: a role for molecular analysis using quantitative real-time reverse transcription-PCR for MARTl and tyrosinase messenger RNA Clin Cancer Res 11:1425-1433

[0186] Adema et al. (1994) Molecular characterization of the melanocyte lineage specific antigen gplOO J Biol Chem 69:20126-20133

[0187] Ahmed et al. (2004) Cdc42-dependent nuclear translocation of non-receptor tyrosine kinase, ACK Biochem. Biophys. Res. Commun. 314:571-579

[0188] Aitken et al. (2004) Population screening for melanoma: current evidence and a community based randomized trial. In “Textbook of Melanoma” Ed. by J F Thompson, D L Morton and B B R Kroon. Martin and Dunitz

[0189] Akula et al. (2004) Raf promotes human herpesvirus-8 (HHV-8/KSHV) infection Oncogene 23:5227-5241

[0190] Alexa et al. (2004) Contribution of distinct structural elements to activation of calpain by Ca2+ ions J. Biol. Chem. 279:201 18-20126

[0191] Altznauer et al. (2004) Calpain-1 regulates Bax and subsequent Smac-dependent caspase-3 activation in neutrophil apoptosis J. Biol. Chem. 279:5947-5957

[0192] Antonescu et al. (2002) Molecular diagnosis of clear cell sarcoma: detection of EWS-ATFl and MITF-M transcripts and histopathological and ultrastructural analysis of 12 cases J. Mol. Diag. 4:44-52

[0193] Arozarena et al. (2004) Activation of H-Ras in the endoplasmic reticulum by the RasGRF family guanine nucleotide exchange factors MoI. Cell. Biol. 24:1516-1530

[0194] Bae et al. (2003) Gene expression patterns as potential molecular biomarkers for malignant transformation in human keratinocytes treated with MNNG, arsenic or a metal mixture Toxicol Sci 74:32-42

[0195] Balch et al. (2001) Final version of the American Joint Committee on cancer staging system for cutaneous melanoma J Clin Oncol 19:3635-3648

[0196] Baldi et al. (2003) Identification of genes down-regulated during melanoma progression: a cDNA array study Exp Dermatol 12:213-218

[0197] Barac et al. (2004) Direct interaction of p21 -activated kinase 4 with PDZ-RhoGEF, a G protein-linked Rho guanine exchange factor J. Biol. Chem. 279:6182-6189

[0198] Bendotti et al. (2004) Activated p38MAPK is a novel component of the intracellular-inclusions found in human amyotrophic lateral sclerosis and mutant SODl transgenic mice J. Neuropathol. Exp. Neurol. 63:113-119

[0199] Bittner et al. (2000) Molecular classification of cutaneous malignant melanoma by gene expression profiling Nature 406:536-540

[0200] Bostick et al. (1999) Prognostic significance of occult metastases detected by sentinel lymphadenectomy and reverse transcriptase-polymerase chain reaction in early-stage melanoma patients J. Clin. Oncol. 17:3238-3244

[0201] Brown et al. (2003) MIC-I Serum Level and Genotype: Associations with Progress and Prognosis of Colorectal Carcinoma Clin. Cancer Res. 9:2642-2650

[0202] Buckhaults et al. (2001) Secreted and cell surface genes expressed in benign and malignant colorectal tumors Cancer Res. 61:6996-7001

[0203] Burzio et al. (2002) Biochemical and cellular characteristics of the four splice variants of protein kinase CKl alpha from zebrafish (Danio rerio) J. Cell. Biochem. 86:805-814

[0204] Buchs et al. (2004) Normal p21 Ras/MAP kinase pathway expression and function in PBMC from patients with polycystic ovary disease Int. J. Mol. Med. 13:595-599

[0205] Cancer Facts and Figures 2003. American Cancer Society, 2003.

[0206] Care et al. (1996) HOXB7 constitutively activates basic fibroblast growth factor in melanomas MoI. Cell. Biol. 16:4842-4851

[0207] Carlson et al. (2003) Biomarkers in melanoma: staging, prognosis and detection of early metastasis Expert Rev MoI Diagn 3:89-116

[0208] Catala et al. (2002) Genetic control of caudal development Clin. Genet. 61:89-96

[0209] Chen et al. (2003) Molecular characterization of human ninein protein: two distinct subdomains required for centrosomal targeting and regulating signals in cell cycle Biochem. Biophys. Res. Commun. 308:975-983

[0210] Karan et al. (2003) Dysregulated expression of MIC-1/PDF in human prostate tumor cells Biochim. Biophys. Res. Commun. 305:598-604

[0211] Chen et al. (2004) MEKl,2 response element mediates angiotensin Il-stimulated plasminogen activator inhibitor-1 promoter activation Blood 103:2636-2644

[0212] Chen et al. (2004) Cdc42 and the actin-related protein/neural Wiskott-Aldrich syndrome protein network mediate cellular invasion by Cryptosporidium parvum Infect. Immun. 72:3011-3021

[0213] Cheung et al. (2001) Detection of microscopic disease: comparing histology, immunocytology, and RT-PCR of tyrosine hydroxylase, GAGE, and MAGE Med. Ped. Oncol. 36:210-212

[0214] Ching et al. (2003) Identification of an autoinhibitory domain of p21-activated protein kinase 5 J. Biol. Chem. 278:33621-33624

[0215] Clark et al. (2003) The secreted protein discovery initiative (SPDI), a large-scale effort to identify novel human secreted and transmembrane proteins: a bioinformatics assessment Genome Res. 13:2265-2270

[0216] Cochran et al. (2001) Current practice and future directions in pathology and laboratory evaluation of the sentinel node Ann Surg Oncol. 8(9 Suppl):13S-17S

[0217] Cochran et al. (2004) Optimized assessment of sentinel lymph nodes for metastatic melanoma: implications for regional surgery and overall treatment planning Ann. Surg. Oncol. 11:156S-161S

[0218] Cook et al (2003) The development of optimal pathological assessment of sentinel lymph nodes for melanoma J. Pathol. 200:314-319

[0219] Cronin et al. (2004) Measurement of gene expression in archival paraffin-embedded tissues: development and performance of a 92-gene reverse transcriptase-polymerase chain reaction assay Am J Pathol 164:35-42

[0220] Davids et al. (2003) Accurate molecular detection of melanoma nodal metastases: an assessment of multimarker assay specificity, sensitivity, and detection rate MoI. Pathol. 56:43-51

[0221] de Braud et al. (2003) Malignant melanoma Critical Review In Oncology/Hematology 47:35-63

[0222] Diego et al. (2003) Prognostic Significance of Reverse Transcriptase-Polymerase Chain Reaction-Negative Sentinel Nodes in Malignant Melanoma Ann. Surg. Oncol. 10:396-402

[0223] Ducy et al. (2000) The family of bone morphogenetic proteins Kidney int. 57:2207-2214

[0224] Dwivedi et al. (2004) Protein kinase A in postmortem brain of depressed suicide victims: altered expression of specific regulatory and catalytic subunits Biol. Psychiatry 55:234-243

[0225] Edgar et al. (2002) Cloning and tissue distribution of three murine alpha/beta hydrolase fold protein cDNAs Biophys. Biochim. Res. Comm. 292:617-625

[0226] Encinas et al. (2004) Tyrosine 981, a novel ret autophosphorylation site, binds c-Src to mediate neuronal survival J. Biol. Chem. 279:18262-18269

[0227] Esler et al. (2001) A portrait of Alzheimer secretases—new features and familiar faces Science 293:1449-1454

[0228] Evellin et al. (2002) Stimulation of phospholipase C-epsilon by the M3 muscarinic acetylcholine receptor mediated by cyclic AMP and the GTPase Rap2B J. Biol. Chem. 277:16805-16813

[0229] Fenner et al. (1998) MSGl (melanocyte-specific gene 1): mapping to chromosome XqI 3.1, genomic organization, and promoter analysis Genomics 51:401-407

[0230] Fogel et al. (2003) Ll adhesion molecule (CD171) in development and progression of human malignant melanoma Cancer Letters 189:237-247

[0231] Fujii et al. (2004) Am. J. Physiol. Cell Physiol. 287:C200-C208

[0232] Gangemi et al. (2004) Regulatory genes controlling cell fate choice in embryonic and adult neural stem cells J Neurochem 89:286-306

[0233] Giancotti et al. (1999) Integrin signaling Science 285:1028-1032

[0234] Golubovskaya et al. (2004) Cloning and characterization of the promoter region of human focal adhesion kinase gene: nuclear factor kappa B andp53 binding sites Biochim. Biophys. Acta 1678:111-125

[0235] Gosmanov et al. (2004) Impaired expression and insulin-stimulated phosphorylation of Akt-2 in muscle of obese patients with atypical diabetes Am. J. Physiol. Endocrinol. Metab. 287:E8-E15

[0236] Goydos et al. (2003) Patterns of recurrence in patients with melanoma and histologically negative but RT-PCR-positive sentinel lymph nodes J. Am. Coll. Surg. 196:196-204

[0237] Grimsley et al. (2004) Dockl80 and ELMOl proteins cooperate to promote evolutionarily conserved Rac-dependent cell migration J. Biol. Chem. 279:6087-6097

[0238] Gronholm et al. (2003) Merlin links to the cAMP neuronal signaling pathway by anchoring the RIbeta subunit of protein kinase A J. Biol. Chem. 278:41167-41172

[0239] Guan et al. (2003) ASC/TMS1, a caspase-1 activating adaptor, is down regulated by aberrant methylation in human melanoma Int J Cancer 107:202-208

[0240] Gustafson et al. (2004) Bcr-Abl Regulates Protein Kinase Ci (PKCt) Transcription via an Elkl Site in the PKCi Promoter J. Biol. Chem. 279:9400-9408

[0241] Gutzmer et al. (2002) Specificity of tyrosinase and HMB45 PCR in the detection of melanoma metastases in sentinel lymph node biopsies Histopathol 41:510-518

[0242] Haendeler et al. (2003) GITI mediates Src-dependent activation of phospholipase Cgamma by angiotensin II and epidermal growth factor J. Biol. Chem. 278:49936-49944

[0243] Hafher et al. (2003) Loss of EphB6 expression in metastatic melanoma Int. J. Oncol. 23:1553-1559

[0244] Haqq et al. (2005) The gene expression signature of melanoma progression Proc Natl Acad Sci USA 102:6092-6097

[0245] Haspel et al (2003) Front. Biosci. 8:S1210-S1225

[0246] Hendrix et al. (2002) Cancer Res 62:665-668

[0247] Henshall et al. (2003) Cancer Res. 63:4196-4203

[0248] Hilgard et al. (2004) Am. J. Physiol. Gastrointest. Liver Physiol. 287:G192-G201

[0249] Hipfel et al. (1998) RNA isolation from human skin tissues for colorimetric differential display J Biochem Biophys Method 37:131-135

[0250] Hipfel et al. (2000) Br. J. Cancer 82:1149-1157

[0251] Hiraga et al. (1997) Virchows Archiv. 431:45-51

[0252] Hisaoka et al. (2002) J. Pathol. 197:661-667

[0253] Hoek et al. (2004) Expression profiling reveals novel pathways in the transformation of melanocytes to melanomas Cancer Res 64:5270-5282

[0254] Hoon et al. (2001) J. Invest. Dermatol. 117:375-378

[0255] Hoon et al. (2004) Profiling epigenetic inactivation of tumor suppressor genes in tumor and plasma from cutaneous melanoma patients Oncogene 23:4014-4022

[0256] Izard et al. (2004) Nature 427:171-175

[0257] Jaffer et al. (2002) Int. J. Biochem. Cell Biol. 34:713-717

[0258] Kadaja et al. (2004) Oncogene 23:2523-2530

[0259] Kam et al. (2004) Neuropathol. Appl. Neurobiol. 30:225-232

[0260] Kamholz et al. (1996) Proc. Natl. Acad. Sci. USA 83:4962-4966

[0261] Kammula et al. (2004) Serial follow-up and prognostic significance of reverse transcriptase-polymerase chain reaction-staged sentinel lymph nodes from melanoma patients J Clin Oncol 22:3989-3996

[0262] Kaneda et al. (2002) Int. J. Cancer 100:57-62

[0263] Kikuchi et al. (2003) An N-terminal fragment of ProSAAS (a granin-like neuroendocrine peptide precursor) is associated with tau inclusions in Pick's disease Biochem. Biophys. Res. Commun. 308:646-654

[0264] Kirchhoff et al. (2004) J. Virol. 78:6864-6874

[0265] Kitano et al. (2003) Mol. Biol. Evol. 20:1281-1289

[0266] Kuo et al. (2003) Prediction of disease outcome in melanoma patients by molecular analysis of paraffin-embedded sentinel lymph nodes J Clin Oncol 21:3566-3572

[0267] Lee et al. (2004) J. Biol. Chem. 279:6834-6839

[0268] Lee et al. (2004) J. Neurosci. 24:2304-2312

[0269] Li et al. (1995) Proc. Natl. Acad. Sci. USA 92:121180-12184

[0270] Li et al. (2004) J. Biol. Chem. 279:15938-15945

[0271] Li et al. (2004) J. Biol. Chem. 279:20401-20410

[0272] Liu et al (2003) Cancer Res. 63:5034-5040

[0273] Liu et al. (1992) J. Biol. Chem. 267:15829-15835

[0274] Liu et al. (2003) Macrophage inhibitory cytokine 1 reduces cell adhesion and induces apoptosis in prostate cancer cells Cancer Res 63:5034-40

[0275] Luftner et al. (2003) Plasma levels of HER-2/neu, tumor type M2 pyruvate kinase and its tyrosine-phosphorylated metabolite in advanced breast cancer Anticancer Res. 23(2A):991-997

[0276] Luo et al. (2001) Human prostate cancer and benign prostatic hyperplasia: molecular dissection by gene expression profiling Cancer Res 61:4683-4688

[0277] Luthi et al. (2003) Exp. Hematol. 31:150-158

[0278] MacDougall et al. (2003) J. Clin. Endocrinol. Metab. 88:2194-2205

[0279] Majumder et al. (2004) Nat. Med. 10:594-601

[0280] Mandelcorn-Monson et al. (2003) J. Invest. Dermatol. 121:550-556

[0281] Marchetti et al. (2003) J. Cell. Biochem. 88:865-872

[0282] Maresh et al. (1994) DNA Cell. Biol. 13:87-95

[0283] Marlow et al. (2003) Biochem. Biophys. Res. Commun. 305:502-509

[0284] McGregor et al. (1999) Proc. Natl. Acad. Sci. USA 96:4540-4545

[0285] McMasters (2003) Molecular staging of melanoma: sensitivity, specificity and the search of clinical significance Ann Surg Oncol 10:336-337

[0286] Menez et al. (2004) Oncogene 23:2630-2639

[0287] Messina et al. (1999) Pathologic examination of the sentinel lymph node in malignant melanoma Am J Surg Pathol 23:686-690

[0288] Monaco (2004) Evidence regarding a role fro CDK5 dysregulation in Alzheimer's disease Curr Alzheimer Res 1:33-38

[0289] Morton et al. (1992) Technical details of intraoperative lymphatic mapping for early stage melanoma Arch Surg 127:392-399

[0290] Nakamura et al. (2003) Quantitative analysis of macrophage inhibitory cytokine-1 (MIC-I) gene expression in human prostatic tissues Br. J. Cancer 88:1101-1104

[0291] Nishihara et al. (2004) Cyclic AMP promotes cAMP-responsive element-binding protein-dependent induction of cellular inhibitor of apoptosis protein-2 and suppresses apoptosis of colon cancer cells through ERK1/2 and p38 MAPK J. Biol. Chem. 279:26176-26183

[0292] Nomura et al. (2004) Identification of a novel domain of Ras and Rapl that directs their differential subcellular localizations!. Biol. Chem. 279:22664-22673

[0293] Oda et al. (2003) CrkL directs ASAPl to peripheral focal adhesions J. Biol. Chem. 278:6456-6460

[0294] Okada et al. (2001) Genetic detection of lymph node micrometastases inpatients with gastric carcinoma by multiple-marker reverse transcriptase-polymerase chain reaction assay Cancer 92:2056-2064

[0295] Okami et al. (2001) Genetic detection for micrometastasis in lymph node of biliary tract carcinoma Clin. Cancer Res. 6:2326-2332

[0296] Ooka et al. (2000) Selection of mRNA markers for detection of lymph node micrometastases in breast cancer patients Oncol. Rep. 7:561-566

[0297] Oury et al. (2004) ATP augments von Willebrand factor-dependent shear-induced platelet aggregation through Ca2+-calmodulin and myosin light chain kinase activation J. Biol. Chem. 279:26266-26273

[0298] Palmieri et al. (2001) Detection of occult melanoma cells in paraffin-embedded histologically negative sentinel lymph nodes using a reverse transcriptase polymerase chain reaction assay J. Clin. Oncol. 19:1437-1443

[0299] Paralkar et al. (1998) Cloning and characterization of a novel member of the transforming growth factor-beta/bone morphogenetic protein family J. Biol. Chem. 273:13760-13767

[0300] Pastorino et al. (2004) BACE (beta-secretase) modulates the processing of APLP2 in vivo MoI. Cell. Neurosci. 25:642-649

[0301] Patel et al. (2003) Cadherin switching in ovarian cancer progression Int. J. Cancer 106:172-177

[0302] Pitsi et al. (2004) Presenilin 1 stabilizes the C-terminal fragment of the amyloid precursor protein independently of gamma-secretase activity J. Biol. Chem. 279:25333-25338

[0303] Masters et al. (1985) Amyloid plaque core protein in Alzheimer disease and Down syndrome Proc. Natl. Acad. Sci. U.S.A. 82:4245-4249

[0304] Polyak et al. (1997) A model for p53-induced apoptosis Nature 389:300-305

[0305] Pontow et al. (2004) Actin cytoskeletal reorganizations and coreceptor-mediated activation of rac during human immunodeficiency virus-induced cell fusion J. Virol. 78:7138-7147

[0306] Prichard et al. (2003) The role of molecular staging in malignant melanoma Eur. J. Surg. Oncol. 29:306-314

[0307] Qi et al. (2004) α-Chimaerin exists in a functional complex with the Cdk5 kinase in brain FEBS Lett. 561:177-180

[0308] Qi et al. (2004) Essential Role of p38 {gamma} in K-Ras Transformation Independent of Phosphorylation J. Biol. Chem. 279:22138-22144

[0309] Qin et al. (2004) p53-independent NOXA induction overcomes apoptotic resistance of malignant melanomas MoI Cancer Therap 3:895-902

[0310] Raas-Rothschild et al. (2002) A PEX6-defective peroxisomal biogenesis disorder with severe phenotype in an infant, versus mild phenotype resembling Usher syndrome in the affected parents Am. J. Hum. Genet. 70:1062-1068

[0311] Raich et al. (1986) Molecular cloning and complete primary sequence of human erythrocyte porphobilinogen deaminase Nucl. Acids Res. 14:5955-5968

[0312] Ray et al. (1997) AIMl, a novel non-lens member of the betagamma-crystallin superfamily, is associated with the control of tumorigenicity in human malignant melanoma Proc. Natl. Acad. Sci. USA 94:3229-3234

[0313] Reifenberger et al. (2004) Frequent alterations of Ras signaling pathway genes in sporadic malignant melanomas hit. J. Cancer 109:377-384

[0314] Reintgen et al. (2004) The staging of malignant melanoma and the Florida Melanoma Trial Ann. Surg. Oncol. 11(3 Suppl):186S-191S

[0315] Rliee et al. (2004) MEK is a key modulator for TLR5-induced interleukin-8 and MIP3alpha gene expression in non-transformed human colonic epithelial cells J. Biol. Chem. 279:25179-25188

[0316] Riccioni et al. (2002) The sentinel lymph node in melanoma: utilization of molecular biology (RT-PCR) to detect occult metastases Pathologica 94:190-195

[0317] Rimboldi et al. (2003) Detection of micrometastasis in sentinel lymph nodes from melanoma patients: direct comparison of multimarker molecular and immunopathological methods Melanoma Res 13:511-520

[0318] Ring et al. (1998) Five SWI/SNF-related, matrix-associated, actin-dependent regulator of chromatin (SMARC) genes are dispersed in the human genome Genomics 51:140-143

[0319] Ryden et al. (1996) Expression of mRNA for the neurotrophin receptor trkC in neuroblastomas with favourable tumour stage and good prognosis Br. J. Cancer 74:773-779

[0320] Saito et al. (2004) Immunohistochemical diagnosis of a rare case of epithelioid malignant peripheral nerve sheath tumor with multiple metastases Jpn. J. Ophthalmol. 48:199-207

[0321] Sakwe et al. (2004) Involvement of protein kinase C-alpha and -epsilon in extracellular Ca(2+) signalling mediated by the calcium sensing receptor Exp. Cell Res. 297:560-573

[0322] Salazar-Onfray et al. (2002) Tissue distribution and differential expression of melanocortin 1 receptor, a malignant melanoma marker Br. J. Cancer 87:414-422

[0323] Salazar-Onfray et al. (2002) Tissue distribution and differential expression of melanocortin 1 receptor, a malignant melanoma marker Br J Cancer 87:414-422

[0324] Sasaki et al. (2004) BRAF point mutations in primary melanoma show different prevalences by subtype J. Invest. Dermatol. 123:177-183

[0325] Satyamoorthy et al. (2002) A versatile method for the removal of melanin from ribonucleic acids in melanocytic cells Mel. Res. 12:449-452

[0326] Schechtman et al. (2004) A critical intramolecular interaction for protein kinase Cepsilon translocation J. Biol. Chem. 279:15831-15840

[0327] Schmuth et al. (2004) The effect of LXR activators on AP-I proteins in keratinocytes J. Invest. Dermatol. 123:41-48

[0328] Segal et al. (2003) Classification of clear-cell sarcoma as a subtype of melanoma by genomic profiling J. Clin. Oncol. 21:1775-1781

[0329] Sells et al. (1997) Human p21-activated kinase (Pakl) regulates actin organization in mammalian cells Curr. Biol. 7:202-210

[0330] Seykora et al. (2003) Gene expression profiling of melanocytic lesions Am J Dermatopathol 25:6-11

[0331] Shimizu et al. (1999) High expression pf macrophage migration inhibitory factor in human melanoma cells and is role in tumor cell growth and angiogenesis Biochem Biophys Res Commun 264:751-758

[0332] Shirotani et al. (2004) Immature nicastrin stabilizes APH-I independent of PEN-2 and presenilin: identification of nicastrin mutants that selectively interact with APH-I J. Neurochem. 89:1520-1527

[0333] Shivers et al. (1998) Molecular staging of malignant melanoma: correlation with clinical outcome JAMA 280:1410-1415

[0334] Smith et al. (1997) Chromosomal localization of three human dual specificity phosphatase genes (DUSP4, DUSP6, and DUSP7) Genomics 42:524-7

[0335] Starz et al. (2003) Tyrosinase RT-PCR as a supplement to histology for detecting melanoma and nevus cells in paraffin sections of sentinel lymph nodes Mod Pathol 16:920-929

[0336] Stieber et al. (2003) Molecular basis for the different activation kinetics of the pacemaker channels HCN2 and HCN4 J. Biol. Chem. 278:33672-33680

[0337] Stoletov et al. (2004) Nek and Crk mediate distinct VEGF-induced signaling pathways that serve overlapping functions in focal adhesion turnover and integrin activation Exp. Cell Res. 295:258-268

[0338] Strausberg et al. (2002) Generation and initial analysis of more than 15,000 full-length human and mouse cDNA sequences Proc. Natl. Acad. Sci. USA 99:16899-16903

[0339] Su et al. (2001) Evaluation of acute hepatic failure treated at the Department of Medicine III, Kyushu University Hospital: indications for living-donor liver transplantation Cancer Res. 61:7388-7993

[0340] Suzuki et al. (2000) Power spectral analysis of R-R interval variability before and during the sinusoidal heart rate pattern in fetal lambs Int. J. Oncol. 15:1227-1232

[0341] Swiatek et al. (2004) Regulation of casein kinase I epsilon activity by Wnt signaling J. Biol. Chem. 279:13011-13017

[0342] Szebeni et al. (2003) Role of protein kinase CK2 phosphorylation in the molecular chaperone activity of nucleolar protein b23 J. Biol. Chem. 278:9107-9115

[0343] Taback et al. (2000) The clinical utility of multimarker RT-PCR in the detection of occult metastasis in patients with melanoma Recent Results Cancer Res 158:78-92

[0344] Takeuchi et al. (2004) Prognostic significance of molecular upstaging of paraffin-embedded sentinel lymph nodes in melanoma patients J Clin Oncol 22:2671-2680

[0345] The Washington University-Merck EST Project Hillier et al. (1995)

[0346] Thies et al. (2002) Overexpression of the cell adhesion molecule Ll is associated with metastasis in cutaneous malignant melanoma Eur J Cancer 38:1708-1716

[0347] Tokuo et al. (2004) Myosin X transports Mena/VASP to the tip of filopodia Biochem. Biophys. Res. Commun. 319:214-220

[0348] Tremuth et al. (2004) A fluorescence cell biology approach to map the second integrin-binding site of talin to a 130-amino acid sequence within the rod domain J. Biol. Chem. 279:22258-22266

[0349] Tsutsumi et al. (2003) Regulation of cell proliferation by autocrine motility factor/phosphoglucose isomerase signaling J. Biol. Chem. 278:32165-32172

[0350] Tusher et al. (2001) Significance analysis of microarrays applied to the ionizing radiation response Proc Natl Acad Sci USA 98:5116-5121

[0351] Van Impe et al. (2003) The Nucleo-cytoplasmic actin-binding protein CapG lacks a nuclear export sequence present in structurally related proteins J. Biol. Chem. 278:17945-17952

[0352] Vandesompele et al. (2002) Accurate normalization of real-time quantitative RT-PCR data by geometric averaging of multiple internal control genes Genome Biol 3:1-11

[0353] Wang et al. (2001) Optimal procedure for extracting RNA from human ocular tissues and expression profiling of the congenital glaucoma gene FOXCl using quantitative RT-PCR MoL Vision 7:89-94

[0354] Wang et al. (2002) The third activity for lysyl hydroxylase 3: galactosylation of hydroxylysyl residues in collagens in vitro Matrix Biol. 21:559-566

[0355] Wang et al. (2004) Gene expression profiles and molecular markers to predict recurrence of Dukes' B colon cancer J. Clin Oncol 22:1564-1571

[0356] Weeraratna (2004) Generation and analysis of melanoma SAGE libraries: SAGE advice on the melanoma transcriptome Oncogene 23:2264-2274

[0357] Weiser et al. (2001) Induction of MAGE-3 expression in lung and esophageal cancer cells Ann. Thorac. Surg. 71:295-301

[0358] Welk et al. (2001) Identification and characterization of the gene encoding human cytoplasmic polyadenylation element binding protein Gene 263:113-20.

[0359] Welsh et al. (2003) Large-scale delineation of secreted protein biomarkers overexpressed in cancer tissue and serum Proc Natl Acad Sci USA 100:3410-3415

[0360] Wilson et al. (2000) An early requirement for FGF signaling in the acquisition of neural cell fate in the chick embryo Curr Bio 10:421-429

[0361] Woo et al. (2004) Resveratrol inhibits phorbol myristate acetate-induced matrix metalloproteinase-9 expression by inhibiting JNK and PKC delta signal transduction Oncogene 23:1845-1853

[0362] Wrightson et al. (2001) Reverse transcriptase-polymerase chain reaction (RT-PCR) analysis of nonsentinel nodes following completion lymphadenectomy for melanoma J. Surg. Res. 98:47-51

[0363] Xu et al. (2003) Transforming growth factor-betal stimulated protein kinase B serine-473 and focal adhesion kinase tyrosine phosphorylation dependent on cell adhesion in human hepatocellular carcinoma SMMC-7721 cells Biochem. Biophys. Res. Commun. 312:388-396

[0364] Xu et al. (2003) Expression of neurotrophin receptor Trk-C in nevi and melanomas J Cutan Pathol 30:318-322

[0365] Yamanaka et al. (1999) Expression of MAGE genes in renal cell carcinoma Int. J. MoI. Med. 2:57-60

[0366] Yamauchi et al. (2003) Neurotrophin 3 activation of TrkC induces Schwann cell migration through the c-Jun N-terminal kinase pathway Proc Natl Acad Sci USA 100:14421-14426

[0367] Yang et al. (2003) Macrophage inhibitory cytokine-1: a novel biomarker for p53 pathway activation MoI Cancer Therapy 2:1023-1029

[0368] Yannoni et al. (2004) P66^{ShcA} interacts with MAPKAP kinase 2 and regulates its activity FEBS Lett. 564:205-211

[0369] Yoshimatsu et al. (1998) Expression of the melanoma antigen-encoding gene in human lung cancer J. Surg. Oncol. 67:126-129

[0370] Yu et al. (1999) Detection of microscopic melanoma metastases in sentinel lymph nodes Cancer 86:617-627

[0371] Yu et al. (2004) A minimal length between tau exon 10 and 11 is required for correct splicing of exon 10 J. Neurochem. 90: 164-172

[0372] Zatti et al. (2004) The presenilin 2 M239I mutation associated with familial Alzheimer's disease reduces Ca2+ release from intracellular stores Neurobiol. Dis. 15:269-278

[0373] Zhang et al. (2003) Negative regulation of T cell antigen receptor-mediated Crk-L-C3G signaling and cell adhesion by Cbl-b J. Biol. Chem. 278:23978-23983

[0374] Zhang et al. (2004) Characterization of the cAMP-dependent protein kinase catalytic subunit Cgamma expressed and purified from sf9 cells Protein Expr. Purif. 35:156-169

[0375] Zhang et al. (2004a) Hsp90/p50cdc37 is required for mixed-lineage kinase (MLK) 3 signaling J. Biol. Chem. 279:19457-19463

[0376] Zhou et al. (2004) A novel crosstalk mechanism between nuclear receptor-mediated and growth factor/Ras-mediated pathways through PNRC-Grb2 interaction Oncogene 23:5394-5404

The application's sequence listing, which the Patent Office published only in electronic form, follows.

SEQUENCE LISTING (1001 sequences)

SEQ ID NO: 1 - DNA, 1204 bp, Homo sapiens
cggaacgagggcaacctgcacagccatgcccgggcaagaactcaggacggtgaatggctctcagatgctcctggtgttgctggtgctctcgtggctgccgcatgggggcgccctgtctctggccgaggcgagccgcgcaagtttcccgggaccctcagagttgcactccgaagactccagattccgagagttgcggaaacgctacgaggacctgctaaccaggctgcgggccaaccagagctgggaagattcgaacaccgacctcgtcccggcccctgcagtccggatactcacgccagaagtgcggctgggatccggcggccacctgcacctgcgtatctctcgggccgcccttcccgaggggctccccgaggcctcccgccttcaccgggctctgttccggctgtccccgacggcgtcaaggtcgtgggacgtgacacgaccgctgcggcgtcagctcagccttgcaagaccccaagcgcccgcgctgcacctgcgactgtcgccgccgccgtcgcagtcggaccaactgctggcagaatcttcgtccgcacggccccagctggagttgcacttgcggccgcaagccgccagggggcgccgcagagcgcgtgcgcgcaacggggacgactgtccgctcgggcccgggcgttgctgccgtctgcacacggtccgcgcgtcgctggaagacctgggctgggccgattgggtgctgtcgccacgggaggtgcaagtgaccatgtgcatcggcgcgtgcccgagccagttccgggcggcaaacatgcacgcgcagatcaagacgagcctgcaccgcctgaagcccgacacggagccagcgccctgctgcgtgcccgccagctacaatcccatggtgctcattcaaaagaccgacaccggggtgtcgctccagacctatgatgacttgttagccaaagactgccactgcatatgagcagtcctggtccttccactgtgcacctgcgcgggggaggcgacctcagttgtcctgccctgtggaatgggctcaaggttcctgagacacccgattcctgcccaaacagctgtatttatataagtctgttatttattattaatttattggggtgaccttcttggggactcgggggctggtctgatggaactgtgtatttatttaaaactctggtgataaaaataaagctgtctgaactgttaaaaaaaaaaa

SEQ ID NO: 2 - DNA, 4513 bp, Homo sapiens
gcgcggtgccgccgggaaagatggtcgtggcgctgcggtacgtgtggcctctcctcctctgcagcccctgcctgcttatccagatccccgaggaatatgaaggacaccatgtgatggagccacctgtcatcacggaacagtctccacggcgcctggttgtcttccccacagatgacatcagcctcaagtgtgaggccagtggcaagcccgaagtgcagttccgctggacgagggatggtgtccacttcaaacccaaggaagagctgggtgtgaccgtgtaccagtcgccccactctggctccttcaccatcacgggcaacaacagcaactttgctcagaggttccagggcatctaccgctgctttgccagcaataagctgggcaccgccatgtcccatgagatccggctcatggccgagggtgcccccaagtggccaaaggagacagtgaagcccgtggaggtggaggaaggggagtcagtggttctgccttgcaaccctcccccaagtgcagagcctctccggatctactggatgaacagcaagatcttgcacatcaagcaggacgagcgggtgacgatgggccagaacggcaacctctactttgccaatgtgctcacctccgacaaccactcagactacatctgccacgcccacttcccaggcaccaggaccatcattcagaaggaacccattgacctccgggtcaaggccaccaacagcatgattgacaggaagccgcgcctgctcttccccaccaactccagcagccacctggtggccttgcaggggcagccattggtcctggagtgcatcgccgagggctttcccacgcccaccatcaaatggctgcgccccagtggccccatgccagccgaccgtgtcacctaccagaaccacaacaagaccctgcagctgctgaaagtgggcgaggaggatgatggcgagtaccgctgcctggccgagaactcactgggcagtgcccggcatgcgtactatgtcaccgtggaggctgccccgtactggctgcacaagccccagagccatctatatgggccaggagagactgcccgcctggactgccaagtccagggcaggccccaaccagaggtcacctggagaatcaacgggatccctgtggaggagctggccaaagaccagaagtaccggattcagcgtggcgccctgatcctgagcaacgtgcagcccagtgacacaatggtgacccaatgtgaggcccgcaaccggcacgggctcttgctggccaatgcctacatctacgttgtccagctgccagccaagatcctgactgcggacaatcagacgtacatggctgtccagggcagcactgcctaccttctgtgcaaggccttcggagcgcctgtgcccagtgttcagtggctggacgaggatgggacaacagtgcttcaggacgaacgcttcttcccctatgccaatgggaccctgggcattcgagacctccaggccaatgacaccggacgctacttctgcctggctgccaatgaccaaaacaatgttaccatcatggctaacctgaaggttaaagatgcaactcagatcactcaggggccccgcagcacaatcgagaagaaaggttccagggtgaccttcacgtgccaggcctcctttgacccctccttgcagcccagcatcacctggcgtggggacggtcgagacctccaggagcttggggacagtgacaagtacttcatagaggatgggcgcctggtcatccacagcctggactacagcgaccagggcaactacagctgcgtggccagtaccgaactggatgtggtggagagtagggcacagctcttggtggtggggagccctgggccggtgccacggctggtgctgtccgacctgcacctgctgacgcagagccaggtgcgcgtgtcctggagtcctgcagaagaccacaatgcccccattgagaaatatgacattgaatttgaggacaaggaaatggcgcctgaaaaatggtacagtctgggcaaggttccagggaaccagacctctaccaccctcaagctgtcgccctatgtccactacacctttagggttactgccataaacaaatatggccccggggagcccagcccggtctctgagactgtggtcacacctgaggcagccccagagaagaaccctgtggatgtgaagggggaaggaaatgagaccaccaatatggtcatcacgtggaagccgctccggtggatggactggaacgccccccaggttcagtaccgcgtgcagtggcgccctcaggggacacgagggccctggcaggagcagattgtcagcgaccccttcctggtggtgtccaacacgtccaccttcgtgccctatgagatcaaagtccaggccgtcaacagccagggcaagggaccagagccccaggtcactatcggctactctggagaggactacccccaggcaatccctgagctggaaggcattgaaatcctcaactcaagtgccgtgctggtcaagtggcggccggtggacctggcccaggtcaagggccacctccgcggatacaatgtgacgtactggagggagggcagtcagaggaagcacagcaagagacatatccacaaagaccatgtggtggtgcccgccaacaccaccagtgtcatcctcagtggcttgcggccctatagctcctaccacctggaggtgcaggcctttaacgggcgaggatcggggcccgccagcgagttcaccttcagcaccccagagggagtgcctggccaccccgaggcgttgcacctggagtgccagtcgaacaccagcctgctgctgcgctggcagcccccactcagccacaacggcgtgctcaccggctacgtgctctcctaccaccccctggatgaggggggcaaggggcaactgtccttcaaccttcgggaccccgaacttcggacacacaacctgaccgatctcagcccccacctgcggtaccgcttccagcttcaggccaccaccaaagagggccctggtgaagccatcgtacgggaaggaggcactatggccttgtctgggatctcagattttggcaacatctcagccacagcgggtgaaaactacagtgtcgtctcctgggtccccaaggagggccagtgcaacttcaggttccatatcttgttcaaagccttgggagaagagaagggtggggcttccctttcgccacagtatgtcagctacaaccagagctcctacacgcagtgggacctgcagcctgacactgactacgagatccacttgtttaaggagaggatgttccggcaccaaatggctgtgaagaccaatggcacaggccgcgtgaggctccctcctgctggcttcgccactgagggctggttcatcggctttgtgagtgccatcatcctcctgctcctcgtcctgctcatcctctgcttcatcaagcgcagcaagggcggcaaatactcagtgaaggataaggaggacacccaggtggactctgaggcccgaccgatgaaagatgagaccttcggcgagtacagtgacaacgaggagaaggcctttggcagcagccagccatcgctcaacggggacatcaagcccctgggcagtgacgacagcctggccgattatgggggcagcgtggatgttcagttcaacgaggatggttcgttcattggccagtacagtggcaagaaggagaaggaggcggcagggggcaatgacagctcaggggccacttcccccatcaaccctgccgtggccctagaatagtggagtccaggacaggagatgctgtgcccctggccttgggatccaggcccctccctctccagcaggcccatgggaggctggagttggggcagaggagaacttgctgcctcggatccccttcctaccacccggtccccactttattgccaaaacccagctgcaccccttcctgggcacacgctgctctgccccagcttgggcagatctcccacatgccaggggcctttgggtgctgttttgccagcccatttgggcagagaggctgtggtttgggggagaagaagtaggggtggcccgaaagggtctccgaaatgctgtctttcttgctccctgactgggggcagacatggtggggtctcctcaggaccagggttggcaccttccccctcccccagccactccccagccagcctggctgggactgggaacagaactcggtgtccccaccatctgctgtcttttctttgccatctctgctccaaccgggatgggagccgggcaaactggccgcgggggcaggggaggccatctggagagcccagagtccccccactcccagcatcgcactctggcagcaccgcctcttcccgccgcccagcccaccccatggccggctttcaggagctccatacacacgctgccttcggtacccaccacacaacatccaagtggcctccgtcactacctggctgcggggcgggcacacctcctcccactgcccactggccggc

SEQ ID NO: 3 - DNA, 2146 bp, Homo sapiens
cggagatggatgtctctctttgcccagccaagtgtagtttctggcggattttcttgctgggaagcgtctggctggactatgtgggctccgtgctggcttgccctgcaaattgtgtctgcagcaagactgagatcaattgccggcggccggacgatgggaacctcttccccctcctggaagggcaggattcagggaacagcaatgggaacgccagtatcaacatcacggacatctcaaggaatatcacttccatacacatagagaactggcgcagtcttcacacgctcaacgccgtggacatggagctctacaccggacttcaaaagctgaccatcaagaactcaggacttcggagcattcagcccagagcctttgccaagaacccccatttgcgttatataaacctgtcaagtaaccggctcaccacactctcgtggcagctcttccagacgctgagtcttcgggaattgcagttggagcagaactttttcaactgcagctgtgacatccgctggatgcagctctggcaggagcagggggaggccaagctcaacagccagaacctctactgcatcaacgctgatggctcccagcttcctctcttccgcatgaacatcagtcagtgtgaccttcctgagatcagcgtgagccacgtcaacctgaccgtacgagagggtgacaatgctgttatcacttgcaatggctctggatcaccccttcctgatgtggactggatagtcactgggctgcagtccatcaacactcaccagaccaatctgaactggaccaatgttcatgccatcaacttgacgctggtgaatgtgacgagtgaggacaatggcttcaccctgacgtgcattgcagagaacgtggtgggcatgagcaatgccagtgttgccctcactgtctactatcccccacgtgtggtgagcctggaggagcctgagctgcgcctggagcactgcatcgagtttgtggtgcgtggcaaccccccaccaacgctgcactggctgcacaatgggcagcctctgcgggagtccaagatcatccatgtggaatactaccaagagggagagatttccgagggctgcctgctcttcaacaagcccacccactacaacaatggcaactataccctcattgccaaaaacccactgggcacagccaaccagaccatcaatggccacttcctcaaggagccctttccagagagcacggataactttatcttgtttgacgaagtgagtcccacacctcctatcactgtgacccacaaaccagaagaagacacttttggggtatccatagcagttggacttgctgcttttgcctgtgtcctgttggtggttctcttcgtcatgatcaacaaatatggtcgacggtccaaatttggaatgaagggtcccgtggctgtcatcagtggtgaggaggactcagccagcccactgcaccacatcaaccacggcatcaccacgccctcgtcactggatgcggggcccgacactgtggtcattggcatgactcgcatccctgtcattgagaacccccagtacttccgtcagggacacaactgccacaagccggacacgtgggtcttttcaaacatagacaatcatgggatattaaacttgaaggacaatagagatcatctagtcccatcaactcactatatatatgaggaacctgaggtccagagtggggaagtgtcttacccaaggtcacatggtttcagagaaattatgttgaatccaataagccttcccggacattccaagcctcttaaccatggcatctatgttgaggatgtcaatgtttatttcagcaaaggacgtcatggcttttaaaaactccttttaagcctccttgttttgatgtcaccttggtaggctgggccctctgagaggttggaagctctaggcattgttctctttggatccagggatgctaagtagaaactgcatgagccaccagtgccccggcaccctttaacaccaccagatgggtgttttcccccatccaccactggcagggttgccccttccctccaatcatcactgtgctccttttttcccggcctacgaggcagctcctgccactatctttagagccaataaagagaattaaaaacctgaaaaaaaaaaaaaaa

SEQ ID NO: 4 - DNA, 19 bp, Homo sapiens
ggcagaatcttcgtccgca

SEQ ID NO: 5 - DNA, 18 bp, Homo sapiens
ggacagtggtccccgttg

SEQ ID NO: 6 - DNA, 25 bp, Homo sapiens
cccagctggagttgcacttgcggcc

SEQ ID NO: 7 - DNA, 18 bp, Homo sapiens
gaacaccgacctcgtccc

SEQ ID NO: 8 - DNA, 16 bp, Homo sapiens
ggcggcccgagagata

SEQ ID NO: 9 - DNA, 23 bp, Homo sapiens
cgccagaagtgcggctgggattt

SEQ ID NO: 10 - DNA, 21 bp, Homo sapiens
gctgggactgggaacagaact

SEQ ID NO: 11 - DNA, 21 bp, Homo sapiens
ggagcagagatggcaaagaaa

SEQ ID NO: 12 - DNA, 17 bp, Homo sapiens
tccccaccatctgctgt

SEQ ID NO: 13 - DNA, 22 bp, Homo sapiens
ccacagatgacatcagcctcaa

SEQ ID NO: 14 - DNA, 21 bp, Homo sapiens
ggtcacacccagctcttcctt

SEQ ID NO: 15 - DNA, 25 bp, Homo sapiens
tggcaagcccgaagtgcagttcctt

SEQ ID NO: 16 - DNA, 16 bp, Homo sapiens
gccccggcacccttta

SEQ ID NO: 17 - DNA, 19 bp, Homo sapiens
aaccctgccagtggtggat

SEQ ID NO: 18 - DNA, 15 bp, Homo sapiens
cagatgggtgttttc

SEQ ID NO: 19 - DNA, 22 bp, Homo sapiens
actcagcccagcatcattcttc

SEQ ID NO: 20 - DNA, 23 bp, Homo sapiens
atggctgttgtactcctccaatc

SEQ ID NO: 21 - DNA, 30 bp, Homo sapiens
cttctcctcttggcagattgtctgtagctt

SEQ ID NO: 22 - DNA, 22 bp, Homo sapiens
ccacacacagcctactttccaa

SEQ ID NO: 23 - DNA, 21 bp, Homo sapiens
tacccacgcgaatcactctca

SEQ ID NO: 24 - DNA, 29 bp, Homo sapiens
aacggcaatgcggctgcaacggcggaatt

SEQ ID NO: 25 - DNA, 100 bp, Homo sapiens
gaacaccgacctcgtcccggcccctgcagtccggatactcacgccagaagtgcggctgggatccggcggccacctgcacctgcgtatctctcgggccgcc

SEQ ID NO: 26 - DNA, 110 bp, Homo sapiens
ccacagatgacatcagcctcaagtgtgaggccagtggcaagcccgaagtgcagttccgctggacgagggatggtgtccacttcaaacccaaggaagagctgggtgtgacc

SEQ ID NO: 27 - DNA, 70 bp, Homo sapiens
actcagcccagcatcattcttctcctcttggcagattgtctgtagccgattggaggagtacaacagccat

SEQ ID NO: 28 - DNA, 103 bp, Homo sapiens
ccacacacagcctactttccaagcagagccatgtctggtaacggcaatgcggctgcaacggcggaagaaaacagcccaaagatgagagtgattcgcgtgggta

SEQ ID NO: 29 - DNA, 512 bp, Homo sapiens
ccaaggccatcggccatcggaactaccatgcaggctactccatgtttggggctggcctcaccgtaggcctgtctaacctcttctgtggagtctgcgtgggcatcgtgggcagtggggctgccctggccgatgctcagaaccccagcctctttgtaaagattctcatcgtggagatctttggcagcgccattggcctctttggggtcatcgtcgcaattcttcagacctccagagtgaagatgggtgactagatgatatgtgtgggtggggccgtgcctcacttttatttattgctggttttcctgggacagctggagctgtgtcccttagcctttcagaggcttggtgttcagggccctccctgcactcccctcttgctgcgtgttgatttggaggcactgcagtccaggccgagtcctcagtgcggggagcaggctgctgctgctgactctgtgcagctgcgcacctgtgtcccccacctccaccctcaacccatcttcctagtgtttgtg

SEQ ID NO: 30 - DNA, 419 bp, Homo sapiens
tctctctttgtgggttggccaggaggttcccccgaccaggttggggagacttggggccagcgcttctggtctggtaaatatgtatgatgtgttgtgcttttttaaccaaggaggggccagtggattcccacagcacaaccggtcccttccatgccctgggatgcctcaccacacccaggtctcttcctttgctctgaggtcccttcaaggcctccccaatccaggccaaagccccatgtgccttgtccagggaactgcctgggccatgcgaggggccagcagagggcgccaccacctgacggctgggacccacccagcccctctcccctctctgctccagactcacttgccattgccaggagatggccccaacaagcaccccgcttttgcagcagaggagctgagttggcagaccgggc

SEQ ID NO: 31 - DNA, 505 bp, Homo sapiens
cctatcagaatatgtccctcaacccccgaaacaaggcttctctcagcctccccaccagtgatggataacagctcctattctcagctgacctgactgagccaacccatgaactcttcactccttggggaagccacctcccatcacacccctgagcagagttagggaggaattctacttcccataaaaggacctctcctgagaggcaaaacctgttgcctccaccacggcttccctcttggctcattccaagcttggccaaattggggaagtgggatggaggttgccctgcatcccccctcctctgcctgagtgtgtctttgtaatgtcagctggcatcatacaaagagcaggagaagcaaacacccagaactcttttgctggtcagagattccctgagtgtctgtcctcacccaagcctgctctgtgtctgtgttgtgaagcttgagactctggaaagaaatggggagggggggcaggggaaatgttgccctaagaatgcttctca

SEQ ID NO: 32 - DNA, 475 bp, Homo sapiens
agttgaagatggtcccttacagcttcccaagttaggttagtgatgtgaaatgctcctgtccctggccctacctccttccctgtccccacccctgcataaggcagttgttggttttcttccccaattcttttccaagtaggttttgtttaccctactccccaaatccctgagccagaagtggggtgcttatactcccaaaccttgagtgtccagccttcccctgttgtttttagtctcttgtgctgtgcctagtggcacctgggctggggaggacactgccccgtctaggtttttataaatgtcttactcaagttcaaacctccagcctgtgaatcaactgtgtctcttttttgacttggtaagcaagtattaggctttggggtggggggaggtctgtaatgtgaaacaacttcttgtctttttttctcccactgttgtaaataacttttaatggccaaaccccagatttgtactt

SEQ ID NO: 33 - DNA, 441 bp, Homo sapiens
caaggctgggccgggaagggcgtgggttgaggagaggctccagacccgcacgccgcgcgcacagagctctcagcgccgctcccagccacagcctcccgcgcctcgctcagctccaacatggcaaaaatctccagccctacagagactgagcggtgcatcgagtccctgattgctgtcttccagaagtatgctggaaaggatggttataactacactctctccaagacagagttcctaagcttcatgaatacagaactagctgccttcacaaagaaccagaaggaccctggtgtccttgaccgcatgatgaagaaactggacaccaacagtgatggtcagctagatttctcagaatttcttaatctgattggtggcctagctatggcttgccatgactccttcctcaaggctgtcccttcccagaagcggacctgaggaccc

SEQ ID NO: 34 - DNA, 276 bp, Homo sapiens
ggcacctggggctcatggattggccccgaccacgacaagttcagtgccatgaagtatgagcaaggcacgggctgctggcagggccccaaccgctccaccaccgtgcgcctcctgtgcgggaaagagaccatggtgaccagcaccacagagcccagtcgctgcgagtacctcatggagctgatgacgccagccgcctgcccggagccaccgcctgaagcacccaccgaagacgaccatgacgagctctagctggatgggcgcagagaacctcaagaa

SEQ ID NO: 35 - DNA, 567 bp, Homo sapiens
ttcccgtgcaaccagtttgggcatcaggagaacgccaagaacgaagagattctgaattccctcaagtacgtccggcctggtggtgggttcgagcccaacttcatgctcttcgagaagtgcgaggtgaacggtgcgggggcgcaccctctcttcgccttcctgcgggaggccctgccagctcccagcgacgacgccaccgcgcttatgaccgaccccaagctcatcacctggtctccggtgtgtcgcaacgatgttgcctggaactttgagaagttcctggtgggccctgacggtgtgcccctacgcaggtacagccgccgcttccagaccattgacatcgagcctgacatcgaagccctgctgtctcaagggcccagctgtgcctagggcgcccctcctaccccggctgcttggcagttgcagtgctgctgtctcgggggggttttcatctatgagggtgtttcctctaaacctacgagggaggaacaccttgatcttacagaaaataccacctcgagatgggtgctggtcctgttgatcccagtctctgccagaccaaggcgagtt

SEQ ID NO: 36 - DNA, 165 bp, Homo sapiens
gggctgcatcaccatcataggtggtggagacactgccacttgctgtgccaaatggaacacggaggataaagtcagccatgtgagcactgggggtggtgccagtttggagctcctggaaggtaaagtccttcctggggtggatgctctcagcaatatttagtactt

SEQ ID NO: 37 - DNA, 481 bp, Homo sapiens
gagtatgtagtggcttcttttgaactgttagatgctgaatatctgttcacttttcaatcccaattctgtcccaatcttaccagatgctactggacttgaatggttaataaaactgcacagtgctgttggtggcagtgacttcttttgagttaggttaataaatcaagccatagagcccctcctggttgatacttgttccagatggggcctttggggctggtagaaatacccaacgcacaaatgaccgcacgttctctgccccgtttcttgccccagtgtggtttgcattgtctccttccacaatgactgctttgtttggatgcctcagcccaggtcagctgttactttctttcagatgtttatttgcaaacaaccattttttgttctgtgtcccttttaaaaggcagattaaaagcacaagcgtgtttctagagaacagttgagagagaatctcaagattctacttggtggtttgcttgct

SEQ ID NO: 38 - DNA, 461 bp, Homo sapiens
ctgggctgaccaaaatgtgctttctactgtgagtccctatcccaagatcctggggaaaggagagaccatggtgtgaatgtagagatgccacctccctctctctgaggcaggcctgtggatgaaggaggagggtcagggctggccttcctctgtgcatcactctgctaggttgggggcccccgacccaccatacctacgcctagggagcccgtcctccagtattccgtctgtagcaggagctagggctgctgcctcagctccaagacaagaatgaacctggctgtgtcagtcattttgtcttttcctttttttttttttgccacattggcagagatgggacctaagggtcccacccctcaccccacccccacctcttctgtatgtttgaattctttcagtagctgttgatgctggttggacaggtttgagtcaaattgtactttgctccattgttaattgag

SEQ ID NO: 39 - DNA, 479 bp, Homo sapiens
gattcaaagagattcctgcaggccagaggccggaacacacctttatggctggggctctccgtggtgttctggacccagcccctggagacaccattcacttttactgctttgtagtgactcgtgctctccaacctgtcttcctgaaaaaccaaggcccccttcccccacctcttccatggggtgagacttgagcagaacaggggcttccccaagttgcccagaaagactgtctgggtgagaagccatggccagagcttctcccaggcacaggtgttgcaccagggacttctgcttcaagttttggggtaaagacacctggatcagactccaagggctgccctgagtctgggacttctgcctccatggctggtcatgagagcaaaccgtagtcccctggagacagccactccagagaacctcttgggagacagaagaggcatctgtgcacagctcgatcttctacttgcctgtggggaggg

SEQ ID NO: 40 - DNA, 529 bp, Homo sapiens
gagctggccagcactaagcaaaaactagagaaagctgaaaaccaggttctggccatgcggaagcagtctgagggcctcaccaaggagtacgaccgcttgctggaggagcacgcaaagctgcaggctgcagtagatggtcccatggacaagaaggaagagtaagggcctccttcctcccctgcctgcagctggcttccacctggcacgtgcctgctgcttcctgagagcccggcctctccctccagtacttctgtttgtgcccttctgcttcccccattcccttccacagctcatagctcgtcatctcggcccttgtccacactctccaagcacattacaggggacctgattgctacacgttcagaatgcgtttgctgtcatcctgcttggcctggccaggcctggcacagccttggcttccacgcctgagcgtggagagcacgagttagttgtagtccggcttgcggtggggctgacttcctgttggtttgagcccctttttgttttgccctctgggtgttttctttgg

SEQ ID NO: 41 - DNA, 195 bp, Homo sapiens
tccccctgtagactagtgccgtgggagtacctgctgcccagctgctgtggccccctccgtgatccatccatctccagggagcaagacagagacgcaggatggaaagcggagttcctaacaggatgaaagttcccccatcagttcccccagtacctccaagcaagtagctttccacatttgtcacagaaatcagag

SEQ ID NO: 42 - DNA, 301 bp, Homo sapiens
tggtgttgggagccctttggagaacgccagtctccaggtccccctgcatctatcgagtttgcaatgtcacaacctctctgatcttgtgctcagcatgattctttaatagaagttttatttttcgtgcactctgctaatcatgtgggtgagccagtggaacagcgggagcctgtgctggtttgcagattgcctcctaatgacgcggctcaaaaggaaaccaagtggtcaggagttgtttctgacccactgatctctactaccacaaggaaaatagtttaggagaaaccagcttttactgttt

SEQ ID NO: 43 - DNA, 562 bp, Homo sapiens
gtttgtagactctctgaccaaggccacctgtgccccccagcatggggccccgggtcctgggcctgctgacgccagcaaggtggtggccaagggcctggggctgagcaaggcctacgtaggccagaagagcagcttcacagtagactgcagcaaagcaggcaacaacatgctgctggtgggggttcatggcccaaggaccccctgcgaggagatcctggtgaagcacgtgggcagccggctctacagcgtgtcctacctgctcaaggacaagggggagtacacactggtggtcaaatgggggcacgagcacatcccaggcagcccctaccgcgttgtggtgccctgagtctggggcccgtgccagccggcagcccccaagcctgccccgctacccaagcagccccgccctcttcccctcaaccccggcccaggccgccctggccgcccgcctgtcactgcagctgcccctgccctgtgccgtgctgcgctcacctgcctccccagccagccgctgacctctcggctttcacttgggcagagggagccatttggtggcgctgct

SEQ ID NO: 44 - DNA, 333 bp, Homo sapiens
gccaagcacacccaggagaactgtgagacctggggtgtaaatggtgagacgggtactttggtggacatgaaggaactgggcatatgggagccattggctgtgaagctgcagacttataagacagcagtggagacggcagttctgctactgcgaattgatgacatcgtttcaggccacaaaaagaaaggcgatgaccagagccggcaaggcggggctcctgatgctggccaggagtgagtgctaggcaaggctacttcaatgcacagaaccagcagagtctccccttttcctgagccagagtgccaggaacactgtggacgtctttgttcagaa

SEQ ID NO: 45 - DNA, 411 bp, Homo sapiens
gtgtctgttgctgatgcctcaaaaagtgtgcaggtctcgactctgaagacagagttcctgccgctcctaagtgtgtcatttgtctcagagaacagcgtcgtggctgctggccatgactgctgcccaatgctctttatctacgatgaccgcggctgcctgaccttcgtctccaagttagatattccaaaacagagcatccaacgcaacatgtctgccatggaacgcttccgcaacatggacaagagagccacaactgaggaccgcaacacggccttggagacgctgcaccagaatagcatcactcaagtctctatttatgaggtggacaagcaagattgtcgcaaattttgcactactggcatcgatggagccatgacaatttgggatttcaagaccctcgagtcttccatc

SEQ ID NO: 46 - DNA, 411 bp, Homo sapiens; identical to SEQ ID NO: 45

SEQ ID NO: 47 - DNA, 555 bp, Homo sapiens
caggccatgcttgcactcagaagttttctcatgaggagattgccatggcgaccgtcacagcgctgcgccgcacagtgccccccgctgtcactgggatcaccttcctgtctggaggccagagtgaggaggaggcgtccatcaacctcaatgccattaacaagtgccccctgctgaagccctgggccctgaccttctcctacggccgagccctgcaggcctctgccctgaaggcctggggcgggaagaaggagaacctgaaggctgcgcaggaggagtatgtcaagcgagccctggccaacagccttgcctgtcaaggaaagtacactccgagcggtcaggctggggctgctgccagcgagtccctcttcgtctctaaccacgcctattaagcggaggtgttcccaggctgcccccaacaactccaggccctgccccctcccactcttgaagaggaggccgcctcctcggggctccaggctggcttgcccgcgctctttcttccctcgtgacagtggtgtgtggtgtcgtctgtgaatgctaagtccatcacccttt

SEQ ID NO: 48 - DNA, 550 bp, Homo sapiens
gcaaattccatcgtgtaatcaaggacttcatgatccagggcggagacttcaccaggggagatggcacaggaggaaagagcatctacggtgagcgcttccccgatgagaacttcaaactgaagcactacgggcctggctgggtgagcatggccaacgcaggcaaagacaccaacggctcccagttcttcatcacgacagtcaagacagcctggctagatggcaagcatgtggtgtttggcaaagttctagagggcatggaggtggtgcggaaggtggagagcaccaagacagacagccgggataaacccctgaaggatgtgatcatcgcagactgcggcaagatcgaggtggagaagccctttgccatcgccaaggagtagggcacagggacatctttctttgagtgaccgtctgtgcaggccctgtagtccgccacagggctctgagctgcactggccccggtgctggcatctggtggagcggacccactcccctcacattccacaggcccatggactcacttttgtaacaaactcctaccaacactgac

SEQ ID NO: 49 - DNA, 198 bp, Homo sapiens
gacttcatgatccagggcggagacttcaccaggggagatggcacaggaggaaagagcatctacggtgagcgcttccccgatgagaacttcaaactgaagcactacgggcctggctgggtgagcatggccaacgcaggcaaagacaccaacggctcccagttcttcatcacgacagtcaagacagcctggctagatggc

SEQ ID NO: 50 - DNA, 493 bp, Homo sapiens
gaaccaattgcgagtcatgtagtgtggtagaattaaaggaggacacgagcctgcttctgttacctccaagtggtaacaggactgatgccgaaatgtcaccaggtcctttcagtcttcacagtggagaactcttggccaaaggtttttggggggaggaggaggaaaccagctttctggttaaggttaacaccagatggtgcccctcattggtgtccttttaaaaaatatttactgtagtccaataagatagcagctgtacaaaatgactaaaatagattgtaggatcatatggcgtatatcttggttcatcttcaaaatcagagactgagctttgaaactagtggtttttaatcaaagttggctttataggaggagtataatgtatgcactactgttttaaaagaattagtgtgagtgtgtttttgtatgaatgagcccattcatggtaagtcttaagcttgttggaaataatgtacccatgtagactagcaaa

SEQ ID NO: 51 - DNA, 509 bp, Homo sapiens
  misc_feature (210)..(210): n is a, c, g, or t
  misc_feature (212)..(213): n is a, c, g, or t
  misc_feature (226)..(226): n is a, c, g, or t
  misc_feature (228)..(231): n is a, c, g, or t
  misc_feature (233)..(234): n is a, c, g, or t
  misc_feature (236)..(240): n is a, c, g, or t
  misc_feature (243)..(243): n is a, c, g, or t
  misc_feature (245)..(246): n is a, c, g, or t
  misc_feature (248)..(249): n is a, c, g, or t
gaaatgactgcaaattcctagtgaatgtacaggtttgctttcgtgtccctcttctggttgctttagaagtgacgtgtaatttctgaacccatgtttcatctgtataaaagaacatctgcaccagtttttctcctgcccctcagaagagccaaactttgagttttatgtctgtttgtcattgataaatttcaataaatctttttatacaantnnaaaaaaaaaaaanannnnannannnnnaananncnnattgatcttttcaagatgcattccagatgaactgctaggtgagggggaagcttcatttttgttacctgatagaatagcttttcttatgagatatatataatgtgatactatgtttggatatttttggtcttaaagcaagactcagtggtgtatcttcattaaaagcttcctttaaaaaagttacagagttactaaaaaaacaagtacccaaacaatcaagttgggccaaccttggaaccttgttttgaatatctttcatt

SEQ ID NO: 52 - DNA, 453 bp, Homo sapiens
gtgagcatttgttcctgactctcaaagaggatggtttggagttctcttacgtttcctggtatttcccaagtctcttgggttggttggaaggctgtggctggtctcagtttggttactcaatgcccaggaggggctgagcaccagccatatcttttgctttggttcacatgatgatacctgcttttctcaggcctgctagaggcatccaacgccctggtttgtaaatagcaacctaaaggcgtattttggcactggtctggggacattccccatctctcatcccttttcccccttcacagatggtggtgggcttcgctctacaaagaggactctgatgttactcttgagcttatgagccagagagctgaaaaccgcaggcttgttgtgttaagttacaaggaaaatggatttggtaattaaaattagaagaaacacaccttcaaacttcaactt

SEQ ID NO: 53 - DNA, 398 bp, Homo sapiens
ctcctggactcaatcatggcttgtggtctggtcgccagcaacctgaatctcaaacctggagagtgccttcgagtgcgaggcgaggtggctcctgacgctaagagcttcgtgctgaacctgggcaaagacagcaacaacctgtgcctgcacttcaaccctcgcttcaacgcccacggcgacgccaacaccatcgtgtgcaacagcaaggacggcggggcctgggggaccgagcagcgggaggctgtctttcccttccagcctggaagtgttgcagaggtgtgcatcaccttcgaccaggccaacctgaccgtcaagctgccagatggatacgaattcaagttccccaaccgcctcaacctggaggccatcaactacatggcagctgacggtgacttcaa

SEQ ID NO: 54 - DNA, 446 bp, Homo sapiens
acgcccgatacgctgagtgtggtttgcggatcctggccttcccgtgtaaccagttcgggaagcaggagccagggagtaacgaagagatcaaagagttcgccgcgggctacaacgtcaaattcgatatgttcagcaagatctgcgtgaacggggacgacgcccacccgctgtggaagtggatgaagatccaacccaagggcaagggcatcctgggaaatgccatcaagtggaacttcaccaagttcctcatcgacaagaacggctgcgtggtgaagcgctacggacccatggaggagcccctggtgatagagaaggacctgccccactatttctagctccacaagtgtgtggccccgcccgagcccctgcccacgcccttggagccttccaccggcactcatgacggcctgcctgcaaacctgctggtggggcagacccgaaaatcc

SEQ ID NO: 55 - DNA, 456 bp, Homo sapiens
aagacgacatgcttcatctgtggtctggagagggacaagtttgataacaagacagtgtcatttgaggaacacatcaagctggagcacaacatgtggaactacttgtacttcattgtgctggtccgcgtgaagaacaagaccgactacacgggccctgagagctacgtggcccagatgatcaagaacaagaacctggactggttcccccggatgcgggccatgtcccttgtcagcaatgagggcgagggggagcagaatgagattcggattctccaggacaagctcaactccaccatgaagctggtgtcccacctcactgcccagctcaacgagctcaaggagcagatgacggagcagcggaaacgcaggcaacgcctaggctttgtggatgtccagaactgcattagccgctgaggagagccaccgaaggccccaacaggggatgctcatcactgg

SEQ ID NO: 56 - DNA, 510 bp, Homo sapiens
acagtcctgcttagagcccttaaaaagacttgaaagttcactgggactcagtttaccttaatgccttagcagaagataaatcctacctagagacctttgttccttaaagcaataactgacaactctttgtagtcctccttgtgggtagttaagagtggggtcacccctttaactccaagcactacattttggcggctgcggcctctgggggaggtggcagttatgctgttactagtgattttagggctttgttatttaacttatttcaagggtgctgtgctcagccctgcccatggctgtgcagctccctccgtgcctcagatctgctgtagccagtgcagacctcactgtcgtgtccatgccacccccggcatggctccaggtggcctggtgactccatgatggacgatcttgctcccaggacctgcctcttcccaggcttcctggggaagagttgtacgcccaggcaacaagggctgagctgcgcttgcgtggctgtttcatgaccgc

SEQ ID NO: 57 - DNA, 522 bp, Homo sapiens
tcagaaggtaggggccgtgtcccgcggtgctgactgaggcctgcttccccctccccctcctgctgtgctggaattccacagggaccagggccaccgcaggggactgtctcagaagacttgatttttccgtccctttttctccacactccactgacaaacgtccccagcggtttccacttgtgggcttcaggtgttttcaagcacaacccaccacaacaagcaagtgcattttcagtcgttgtgcttttttgttttgtgctaacgtcttactaatttaaagatgctgtcggcaccatgtttatttatttccagtggtcatgctcagccttgctgctctgcgtggcgcaggtgccatgcctgctccctgtctgtgtcccagccacgcagggccatccactgtgacgtcggccgaccaggctggacaccctctgccgagtaatgacgtgtgtggctgggaccttctttattctgtgttaatggctaacctgttacactgggctgggttgggtagggtgttctggc

SEQ ID NO: 58 - DNA, 356 bp, Homo sapiens
ctctcttcaacggtgacactcagtatgtctgcagatgtaccccttgttgtagagtataaaattgcggatatgggacacttaaaatactacttggctcccaagatcgaggatgaagaaggatcttaggcattcttaaaattcaagaaaataaaactaagctctttgagaactgcttctaagatgccagcatatactgaagtcttttctgtcaccaaatttgtacctctaagtacatatgtagatattgttttctgtaaataacctattttttttctctattctctccaatttgtttaaagaataaagtccaaagtctgatctggtctagttaacctagaagtatttttgtctcttag

SEQ ID NO: 59 - DNA, 381 bp, Homo sapiens
catccattaggccagcaacgcttgtagaactcactctgggctgtaacgtggcactggtaggttgggacaccagggaagaagatcaacgcctcactgaaacatggctgtgtttgcagcctgctctagtgggacagcccagagcctggctgccccatcatgtggccccacccaatcaagggaagaaggaggaatgctggactggaggcccctggagccagatggcaagagggtgacagcttcctttcctgtgtgtactctgtccagttcctttagaaaaaatggatgcccagaggactcccaaccctggcttggggtcaagaaacagccagcaagagttaggggccttagggcactgggctgttgttccattgaagccgactc

SEQ ID NO: 60 - DNA, 441 bp, Homo sapiens
ttcgatgctcagacaggggccgacagggaggttcagaggatcctgctggagctgctgaatcagatggatggatttgatcagaatgtcaatgtcaaggtaatcatggccacaaacagagcagacaccctggatccggccctgctacggccaggacggctggaccgtaaaattgaatttccacttcctgaccgccgccagaagagattgattttctccactatcactagcaagatgaacctctctgaggaggttgacttggaagactatgtggcccggccagataagatttcaggagctgatatcaactccatctgtcaggagagtggaatgttggctgtccgtgaaaaccgctacattgtcctggccaaggacttcgagaaagcatacaagactgtcatcaagaaggacgagcaggagcatgagttttacaagtgacccttc

SEQ ID NO: 61 - DNA, 442 bp, Homo sapiens
aacacaacttctgaggcaggcctgccccagggggaagcacggacccgagacgacggcgatgaggaagggctcctgacacacagcgaggaagagctggaacacagccaggacacagacgcggatgatggggccttgcagtaagcagcctgacaggagcaatggccaccagcaggtgaagggcatcgctgccccaggcctcaagccgggcacccaaccctggatgccaccccccagcgggtaccagaggaaagctggcagcaggcgcctcctcccccaacgcatcccagccagtgccatgtcctctgcaggtggagttactggcctactccttccccatgagccctccctgtctgcactgcccaggccagagggtagagcacaggggtttccccatactacctcccctccccaggacactcccaggcttgggttttttctatag

SEQ ID NO: 62 - DNA, 524 bp, Homo sapiens
gagacttttttgaactcagacttaaatattatggattaagaaaagaatggctcctaggaatgcttggtgctgaatctgctaaactgaataatcaggctcgctttatcttagagaaaatagatggcaaaataatcattgaaaataagcctaagaaagaattaattaaagttctgattcagaggggatatgattcggatcctgtgaaggcctggaaagaagcccagcaaaaggttccagatgaagaagaaaatgaagagagtgacaacgaaaaggaaactgaaaagagtgactccgtaacagattctggaccaaccttcaactatcttcttgatatgcccctttggtatttaaccaaggaaaagaaagatgaactctgcaggctaagaaatgaaaaagaacaagagctggacacattaaaaagaaagagtccatcagatttgtggaaagaagacttggctacatttattgaagaattggaggctgttgaagccaaggaaaaacaagatgaacaagtcggacttcct

SEQ ID NO: 63 - DNA, 416 bp, Homo sapiens
gagggaccatgtgtcacttgtgctttgctcttgtcccacgtgtcttccactttgcatatgagccgtgaactgtgcatagtgctgggatggaggggagtgttgggcatgtgatcacgcctggctaataaggctttagtgtatttatttatttatttattttatttgtttttcattcatcccattaatcatttccccataactcaatggcctaaaactggcctgacttgggggaacgatgtgtctgtatttcatgtggctgtagatcccaagatgactggggtgggaggtcttgctagaatgggaagggtcatagaaagggccttgacatcagttcctttgtgtgtactcactgaagcctgcgttggtccagagcggaggctgtgtgcctgggggagttttcctctatacatctctcc

SEQ ID NO: 64 - DNA, 556 bp, Homo sapiens
tacagcgtataggtgcagccctgtcacaacaccaacagaagtagcagcctctgggtgcagtcacccacaccccaaagctggaaggatctggttcaacatagcacaaacccttaggaaaaatgaaattaacatcactgatgtgtaatccagtaaaatctccctttttcgggtgtgtatgtgggcatgtgcccatttctatgtgtgtgtctacgtgcagctcactaccaacagcctcatgtgcacttgacctgacagtgctcgctgagaactctcaccaggttggcgcctgaatgccttactctcagcagtcagaggcttgcttgctctgtgcagatttttaattttcttttttggccctaggctggttgggacctctacagcttcattctttcacattaaatagtgacctttttcagtattttccctcttcccctttataaattatgctaaagccacaaagcacatttttggggatcatagaaggttggggttccagaaaggcatctgtgtgatggttccattgatgtgggatttccctacttgctgtattctcagt

SEQ ID NO: 65 - DNA, 453 bp, Homo sapiens
ttggggtataggtctcatctcttcaggttctcatgataccacctttactgtgcttatttttttaagaaaaaagtgttgatcaaccattcgacctataagaagccttaatttgcacagtgtgtgacttacagaaactgcatgaaaaatcatgggccagagcctcggccctagcattgcacttggcctcatgctggagggaggctgggcgggtacagcgcggaggaggagggaggccaggcgggcatggcgtggaggaggagggaggccgggcggtcacagcatggaggaggagggaggcgctgctggtgttcttattctggcggcagcgcctttcctgccatgtttagtgaatgacttttctcgcattgtagaattgtatatagactctggtgttctattgctgagaagcaaaccgccctgcagcatccctcagcctgtaccggtttggctggc

SEQ ID NO: 66 - DNA, 533 bp, Homo sapiens
  misc_feature (360)..(361): n is a, c, g, or t
gaggtcagatttggagcttctcattgcacgcggagattattattgcatcgggttccaagccaatgggaagcccgggggaggggtttggcatgaggaagcgttggttacagcagctgattggctgcagccaagactgtgaaaggataaagaggcgcgaggcggaattggggtctgctctaagctgcagcaagagaaactgtgtgtgaggggaagaggcctgtttcgctgtcgggtctctagttcttgcacgctctttaagagtctgcactggaggaactcctgccattaccagctcccttcttgcagaagggagggggaaacatacatttattcatgccagtctgttgcatgcaggctttnnggcttcctaccttgcaacaaaataattgcaccaactccttagtgccgattccgcccacagagagtcctggagccacagtcttttttgctttgcattgtaggagagggactaagtgctagagactatgtcgctttcctgagctaccgagagcgctcgtgaactggaatcaact

SEQ ID NO: 67 - DNA, 408 bp, Homo sapiens
gtaaaccacatcttttttgcactttttttataagcaaaaacgtgccgtttaaaccactggatctatctaaatgccgatttgagttcgcgacactatgtactgcgtttttcattcttgtatttgactatttaatcctttctacttgtcgctaaatataattgttttagtcttatggcatgatgatagcatatgtgttcaggtttatagctgttgtgtttaaaaattgaaaaaagtggaaaacatctttgtacatttaagtctgtattataataagcaaaaagattgtgtgtatgtatgtttaatataacatgacaggcactaggacgtctgcctttttaaggcagttccgttaagggtttttgtttttaaacttttttttgccatccatcctgtgcaatatgccgtgta

SEQ ID NO: 68 - DNA, 526 bp, Homo sapiens
ccctttggtctggtgccagttctggaaaacagtcagggtcagctgatctacgagtctgccatcacctgtgagtacctggatgaagcatacccagggaagaagctgttgccggatgacccctatgagaaagcttgccagaagatgatcttagagttgttttctaaggtgccatccttggtaggaagctttattagaagccaaaataaagaagactatgctggcctaaaagaagaatttcgtaaagaatttaccaagctagaggaggttctgactaataagaagacgaccttctttggtggcaattctatctctatgattgattacctcatctggccctggtttgaacggctggaagcaatgaagttaaatgagtgtgtagaccacactccaaaactgaaactgtggatggcagccatgaaggaagatcccacagtctcagccctgcttactagtgagaaagactggcaaggtttcctagagctctacttacagaacagccctgaggcctgtgactatgggctctgaa

SEQ ID NO: 69 - DNA, 432 bp, Homo sapiens
gccacagactgaactcgcagggagtgcagcaggaaggaacaaagacaggcaaacggcaacgtagcctgggctcactgtgctggggcatggcgggatcctccacagagaggaggggaccaattctggacagacagatgttgggaggatacagaggagatgccacttctcactcaccactaccagccagcctccagaaggccccagagagaccctgcaagaccacggagggagccgacacttgaatgtagtaataggcagggggccctgccaccccatccagccagaccccagctgaaccatgcgtcaggggcctagaggtggagttcttagctatccttggctttctgtgccagcctggctctgcccctcccccatgggctgtgtcctaaggcccatttgagaagctgaggctagttccaaaaacctctcctg

SEQ ID NO: 70 - DNA, 450 bp, Homo sapiens
gaatttcttggtgattacaggtgggatccaactgcaaatgaagatccagaatggatacttgttgagaaagacagattcgtgaatgattatgacaaagataacgatggcaggcttgatccccaagagctgttaccttgggtagtacctaataatcagggcattgcacaagaggaggcacttcatctaattgatgaaatggatttgaatggtgacaaaaagctctctgaagaagagattctggaaaacccggacttgtttctcaccagtgaagccacagattatggcagacagctccatgatgactatttctatcatgatgagctttaatctccgagcctgtctcagtagagtactggctccttttataatttgttaccagctttacttttgtgataaaatattgatgttgtattttacactcttaagtcttaaccacagtcagaattatct

SEQ ID NO: 71 - DNA, 477 bp, Homo sapiens
gatatttttccaaacgtattgagcaacaaaatattaatattgtgccatatgacaacaaagtctttcctaaatactccatctgtttagtactgtattgtggaatatttgagttctatttccagacttgaaaacatggaggattttagagatgcctgaacaatattatttaagtagtatgtgaccgagctataaattttttgtttttgttctaagtagatttaatttgggaactgacaggacaatgtttttaggtttagcattttgtttaaaaacctttaaagaaacctttagaaggacttagacctcacatattaatgttgagaagttctgcttaattttaaaatggtttctataaagggttttattgtatgaaatagaactttatatttttgcatatgtatagaggataattatatttaatgtataactatagcattatggtgagtggaatttgacattgtccaaacctttttcatt

SEQ ID NO: 72 - DNA, 497 bp, Homo sapiens
  misc_feature (432)..(432): n is a, c, g, or t
gatttagctcttagttcttcaagtaaaattaaagtctcttgtgtaagagccaacacatgcccagctgcggatgggagctgttcctggacagccttctactgcctgggaagtgatggaacaggaactcagggtgcccttaccccctccccagacctgttccctttctttgactgacagagcaccatccaggcaaaattagagcgccaaatggttttcttctcaatcttaaagcagtatacctttccacaggctcgtctgtgtccctgccactctgagttatccagaaaccaccacctacaaatgaggggactcatctagaagacctctaaggtccccttttggctctgaggggtctctaataatccccacttggaattcagcaccgcaaggaaattatgggtatgtgagccataatatgatggccagcaggtngcgctgccttccacccatggtgatggatggtttggaaagggaatgttggtgccttttgtgccaca

SEQ ID NO: 73 - DNA, 481 bp, Homo sapiens
gatgataatccggaccatgctgtatactccacaggaaatgaaacagatcattaaaatccgtgcccagacggaaggaatcaacatcagtgaggaggcactgaaccacctgggggagattggcaccaagaccacactgaggtactcagtgcagctgctgaccccggccaacttgcttgctaaaatcaacgggaaggacagcattgagaaagagcatgtcgaagagatcagtgaacttttctatgatgccaagtcctccgccaaaatcctggctgaccagcaggataagtacatgaagtgagatggctgaggttttcagcagcaagagactccccaggtgtgcctggcctgggtccagcctgtgggcgcttgcccctgggcttggggctgccgtccccactcaggcgtgggctgcagcgctgtcagttcagtgtggaaagcatttctttttaagttatcgtaactgttcctgtggttgctttga

SEQ ID NO: 74 - DNA, 469 bp, Homo sapiens
  misc_feature (40)..(40): n is a, c, g, or t
gacatccttcttagcagaaacttcatgaaaaagtttttgnctgacacagaacaaacctgaaagtagtatctactttctaaatactactttgcttttcagtagtggatttgatatttataatgttctctaaagcttgcaactttttcagcaacgtttaaaaatagattaacctggaataacttacttgtttgctgctaaaatactcaagattttgccatttttaaacaaccagtccctgtgatacaactttgaaaaaacttttaaaaatctctgatgtatgggctctttttttcccataagaattatgtacatctgtgatgttttacagggggatccgcttttaaacagtgtacatattggaccacactgaaatgtcatatatcctttctctacttaaaattggttatttactgtgagttcatttccgatgtgttcttggttgttgctgttttctgcctgaagacgtgta

SEQ ID NO: 75 - DNA, 455 bp, Homo sapiens
caaagtctccttttagtctagataatcattatttcattttaaaattagtgtttttcatagtttgcactgatgcgtgtatggatgtgtgtgagtcagtggtagcttatttaaaaagcaccttatcctttctcccataacctttgtacactaaaaaatgaaagaatttagaatgtatttgatgatagcattctcactaagacacatgagaatttaactttataaccgcgtgagttaagatttaattcataggttttgatgtcattgttgaagttatttgtaattcagaaaccttgcttgtgtgatacatagtaagtctcttcatttattactgcttgcctgttgttatatctggattatcaaaagcaatagtgcaccaattaagatgtgctcaaatcaggacttaaatcataggcaccacatttttcatgtcagactagttactttgttgattctca

SEQ ID NO: 76 - DNA, 525 bp, Homo sapiens
tctggcatcagtttgctacagtgagctcacatcaaataggaaaatacttgaaatgcatgtctcaagctgcaaggcaaactccattcctcatattaaactattacttctcatgacgtcaccatttttaactgacaggattagtaaaacattaagacagcaaacttgtgtctgtctcttctttcattttccccgccaccaacttactttaccacctatgactgtacttgtcagtatgagaatttttctgaatcatattggggaagcagtgattttaaaacctcaagtttttaaacatgatttatatgttctgtataatgttcagtttgtaactttttaaaagtttggatgtatagagggataaataggaaatataagaattggttatttgggggcttttttacttactgtatttaaaaatacaagggtattgatatgaaattatgtaaatttcaaatgcttatgaatcaaatcattgttgaacaaaagatttgttgctgtgtaattattgtcttgtatgcatttgag

SEQ ID NO: 77 - DNA, 397 bp, Homo sapiens
ggagaacttgtctacaaccagggattgattttaaagatgtctttttttattttacttttttttaagcaccaaattttgttgttttttttttctcccctccccacagatcccatctcaaatcattctgttaaccaccattccaacaggtcgaggagagcttaaacaccttcttcctctggccttgtttctcttttattttttattttttcgcatcagtattaatgtttttgcatactttgcatctttattcaaaagtgtaaactttctttgtcaatctatggacatgcccatatatgaaggagatgggtgggtcaaaaagggatatcaaatgaagtgataggggtcacaatggggaaattgaagtggtgcataacattgccaaaatagtgtgccacta

SEQ ID NO: 78 - DNA, 329 bp, Homo sapiens
ctcttcgagagaacctgtcgccagtatgacaagctgcgtaagcgggaggccttcctggagcagttccgcaaggaggacatgttcaaggacaactttgatgagatggacacatccagggagattgtgcagcagctcatcgatgagtaccatgcggccacacggccagactacatctcctggggcacccaggagcagtgagtcccccaggacaggggaccctcatctgccttactggttggcccaagccctgcctgactgaccaccccctcagagcacagatcagggacctcacgcatctctttctcatatacatggactctctgttggcc

SEQ ID NO: 79 - DNA, 535 bp, Homo sapiens
ggagctggaactggtcaccaaggccggcttccgggcccttctctctgccccctggtacctgaaccgtatatcctatggccctgactggaaggatttctacgtagtggaacccctggcatttgaaggtacccctgagcagaaggctctggtgattggtggagaggcttgtatgtggggagaatatgtggacaacacaaacctggtccccaggctctggcccagagcaggggctgttgccgaaaggctgtggagcaacaagttgacatctgacctgacatttgcctatgaacgtttgtcacacttccgctgtgagttgctgaggcgaggtgtccaggcccaacccctcaatgtaggcttctgtgagcaggagtttgaacagacctgagccccaggcaccgaggagggtgctggctgtaggtgaatggtagtggagccaggcttccactgcatcctggccaggggacggagccccttgccttcgtgccccttgcctgcgtgcccctgtgcttggagagaaaggggccggtgctggcgc

SEQ ID NO: 80 - DNA, 537 bp, Homo sapiens
ccaccgctggctgggaggagtcggagactgagacctacacagaggtggtgacagagtttgggaccgaggtggagcccgagtttgggaccaaggtggagcccgagtttgagacccagttggagcctgagttcgagacccagctggaacccgagtttgaggaagaggaggaggaggagaaagaggaggagatagccactggccaggcattccccttcacaacagtagagacctacacagtgaactttggggacttctgagatcagcgtcctaccaagaccccagcccaactcaagctacagcagcagcacttcccaagcctgctgaccacagtcacatcacccatcagcacatggaaggcccctggtatggacactgaaaggaagggctggtcctgcccctttgagggggtgcaaacatgactgggacctaagagccagaggctgtgtagaggctcctgctccacctgccagtctcgtaagagatggggttgctgcagtgttggagtaggggcagagggagggagccaaggtcactcca

SEQ ID NO: 81 - DNA, 483 bp, Homo sapiens
ctgaagcgcagaaagctcggccggtacaacgaggaggagcgggctcagcaggaggccgaggccgcccagcgcctggccgaggagaaggcccaggccagctccatccccgtgggcagccgctgtgaggtgcgggcggcgggacaatcccctcgccggggcaccgtcatgtatgtaggtctcacagatttcaagcctggctactggattggtgtccgctatgatgagccactggggaaaaatgatggcagtgtgaatgggaaacgctacttcgaatgccaggccaagtatggcgcctttgtcaagccagcagtcgtgacggtgggggacttcccggaggaggactacgggttggacgagatatgacacctaaggaattcccctgcttcagctcctagctcagccactgactgcccctcctgtgtgtgcccatggcccttttctcctgaccccattttaattttattcattttttcctttgccatt

SEQ ID NO: 82 - DNA, 505 bp, Homo sapiens
caaggtgaaacactgcagtcccggtgtggtggctccccatgcaggacgggccaggctgggagtgccgccttcctgtgccaaattcagtggggactcagtgcccaggccctggcacgagctttggccttggtctacctgccaggccaggcaaagcgcctttacacaggcctcggaaaacaatggagtgagcacaagatgccctgtgcagctgcccgagggtctccgcccaccccggccggactttgatccccccgaagtcttcacaggcactgcatcgggttgtctggcgcccttttcctccagcctaaactgacatcatcctatggactgagccggccactctctggccgaagtggcgcaggctgtgcccccgagctgcccccaccccctcacagggtccctcagattataggtgcccaggctgaggtgaagaggcctgggggccctgccttccgggcgctcctggaccctggggcaaacctgtgacccttttctactggaatag

SEQ ID NO: 83 - DNA, 299 bp, Homo sapiens
tggccatccgggacagtgagcgacagggcaaggcccaggtggagattgtcactgatggggaggagcctgctgagatgatccaggtcctgggccccaagcctgctctgaaggagggcaaccctgaggaagacctcacagctgacaaggcaaatgcccaggccgcagctctgtataaggtctctgatgccactggacagatgaacctgaccaaggtggctgactccagcccctttgcccttgaactgctgatatctgatgactgctttgtgctggacaacgggctctgtggcaagatctat

SEQ ID NO: 84 - DNA, 533 bp, Homo sapiens
  misc_feature (136)..(136): n is a, c, g, or t
gaaaagtgcatgcttcatttgaacaattcattcagcagcagatggactttcagtgatttaaaataaaattttgatccaaagctcaggacacaaaccacagtggtaaaattgagtagcatataatatcagactaaanttatctgtaattttccacaacccagattgtatgtgttttatgtgtgtttaaataaatatgttagatacacgtgtatacatacacccatatacaacagatccaagactggctgacttcatttgaaatggttgaatctgctgtgtaataaagtggttcaaccatgattaggaactgaaatttagtagaagagggaaaaggagttaatgtaacaaattattttagctacaaaccccggtaatagagcacttgggggatgggatggggtgggttggtgagacaatcagaatggtaaattgattaaatgctcctaaccctgtaattttgtgcatagagcaccctatgctgtggaaataactgttcttagatttcattgtaactggactgttcaggttgccca

SEQ ID NO: 85 - DNA, 403 bp, Homo sapiens
  misc_feature (117)..(117): n is a, c, g, or t
  misc_feature (119)..(119): n is a, c, g, or t
  misc_feature (339)..(339): n is a, c, g, or t
gaaactgcgcattctctagtagtatatatcgtgcctgtcttcaaaaacatttccctttttatactcattccccccaggcatggggtagtgtcagtcggactgcacagggaacacggntnccagtggctttggcccctactcgggaaacgtctgcctgttctcgatggtgatggggtggctgccattcccttggttttcctaagccctttctaacgagagtctcaaacaagcggaggcgagggccaattcaaccccattctttccagcgccccgcaccatagcacctgcccacctgagaaccaggaacgcaccctctctgtggagctctgactggtgtanctggaaacaaacagcaacttgcaaacggacgaagagcctgccgtgtgttaatcatttgccttac

SEQ ID NO: 86 - DNA, 441 bp, Homo sapiens
gttgtctggaaacctgctgaggaaattcaaaaacagcaacgggtggcagaagctgtgggtggtgttcacaaacttctgcctgttcttctacaaatcacaccaggacaatcatccccttgccagcctgcctctgctcggctactcgctcaccatcccctctgagtccgagaacatccagaaagactacgtgttcaagctgcacttcaagtcccacgtctactacttcagggcggaaagcgagtacacgttcgaaaggtggatggaagtgatccgcagtgccaccagctctgcctcgcgaccccacgtgttgagccacaaagagtctcttgtgtattgatggccggacacactcgtttccgcagtggctgctttcctggaagacgtttcctttcttctgtattaatgaagcctggtaaaattaacacctgtctgaaaatcaaa

SEQ ID NO: 87 - DNA, 467 bp, Homo sapiens
tatatgacttggcagatcaactacatgctgcagttggtgcttcccgtgctgctgttgatgctggctttgttcccaatgacatgcaagttggacagacgggaaaaatagtagcaccagaactttatattgctgttggaatatctggagccatccaacatttagctgggatgaaagacagcaagacaattgtggcaattaataaagacccagaagctccaattttccaagtggcagattatggaatagttgcagatttatttaaggtagttcctgaaatgactgagatattgaagaaaaaatgaatcaggatcatgccttaaaaagaaaacttttgttaaagtattccactgaaatcacagatatttgtgggtattataacaatcattggaaagcatggagagctacatttcataatttgagggaaaatttctaacagatgccagaatgcttgtttatgggattgctgt

SEQ ID NO: 88 - DNA, 527 bp, Homo sapiens
cagacaacagcctggtggcagcgggccacgactgcttcccggtgctgttcacctatgacgccgccgcggggatgctgagcttcggcgggcggctggacgttcctaagcagagctcgcagcgtggcttgacggcccgcgagcgcttccagaacctggacaagaaggcgagctccgagggtggcacggctgcgggcgcgggcctagactcgctgcacaagaacagcgtcagccagatctcggtgctcagcggcggcaaggccaagtgctcgcagttctgcaccactggcatggatggcggcatgagtatctgggatgtgaagagcttggagtcagccttgaaggacctcaagatcaaatgacctgtgaggaatatgttgccttcatcctaactgctggggaagcggggagaggggtcagggaggctaatggttgctttgctgaatgtttctggggtaccaatacgagttcccataggggctgctccctcaaaaagggaggggacagatggggagcttttcttacctatt

SEQ ID NO: 89 - DNA, 546 bp, Homo sapiens
acacgtgttgactccattgttttacatgtagcaaagtctgccatctgtgtctgctgtattataaacagataagcagcctacaagataactgtatttataaaccactcttcaacagctggctccagtgctggttttagaacaagaatgaagtcattttggagtctttcatgtctaaaagatttaagttaaaaacaaagtgttacttggaaggttagcttctatcattctggatagattacagatataataaccatgttgactatgggggagagacgctgcattccagaaacgtcttaacacttgagtgaatcttcaaaggaccctgacattaaatgctgaggctttaatacacacatattttatcccaagtttataatggtggtctgaacaaggcacctgtaaataaatcagcatttatgaccagaagaaaaataatctggtcttggactttttatttttatatggaaaagttttaaggacttgggccaactaagtctacccacacgaaaaaagaaatttgccttgtccctttgtgtacaaccatgc

SEQ ID NO: 90 - DNA, 464 bp, Homo sapiens
cagtcactctaaatggacaccacatgaacctctgtttagaatacctacgtatgtatgcattggtttgcttgtttcttgacagtacatttttagatctggccttttcttaacaaaatctgtgcaaaagatgcaggtggatgtccctaggtctgttttcaaagaactttttccaagtgcttgttttatttattaagtgtctacctggtaaatgttttttttgtaaactctgagtggactgtatcatttgctattctaaaccattttacacttaagttaaaatagtttctcttcagctgtaaataacaggatacagaattaacaagagaaaatgtctaactttttaagaaaaaccttattttcttcggtttttgaaaaacataatggaaataaaacaggatattgacataatagcacaaaatgacactcttctaaaactaaatgggcacaagagaattttcctggga

SEQ ID NO: 91 - DNA, 409 bp, Homo sapiens
atcccaaagcaccaattactgccctctgcctcagcagtaccagtataagatgacattccaaagactggaggcaactcagcctgagttaattcacaaaattatgccatgctggggcttgagcttgagcttgggcttaggcttgggctcagcttttgaccctcaggcatctccttttccttcctgtcttcctctcccttctcctctgctgcagcatgattttcttaatcttcagacactcactattttcatgaacagttaccctctgtccccacaaccaaagacaactcatggcctcctttggcccttgtgtaacattgcaaacctgtggctttgcaaaatgtacccaggtcacaaggggatttttttttttttagcaatgatatccctgtctgggtcactttttaagctt

SEQ ID NO: 92 - DNA, 481 bp, Homo sapiens
ggcctctccatagttatcggggatctgctccggcagatccccctggccgtgctctttggaattttcctgtacatgggagtcacctcccttaacgggatccagttctatgagcggctgcatctgctgctcatgccgcccaaacaccacccagatgtcacttacgtcaagaaggtccggaccctccgtatgcacctgttcacggccctgcagctgctctgcctggccctgctctgggccgtcatgtccacagctgcctccctggccttccccttcatcctcatcctcacagtgccgctccgcatggtggtgctcacccgtatcttcaccgaccgagagatgaaatgtctggatgctaacgaggcagagccggtgtttgatgagcgggagggtgtggacgagtacaatgagatgcccatgcctgtgtagccgccaccgagggacagccgagggaccgatggacgaggggacaggctggtgggat

SEQ ID NO: 93 - DNA, 393 bp, Homo sapiens
acagcacggccatccaggagctgttcaagcgcatctccgagcagttcacggccatgttccggcgcaaggccttcctgcactggtacacgggcgagggcatggacgagatggagttcaccgaggccgagagcaacatgaacgacctggtgtccgagtaccagcagtaccaggacgccacggccgaggaagagggcgagatgtacgaagacgacgaggaggagtcggaggcccagggccccaagtgaaactgctcgcagctggagtgagaggcaggtggcggccggggccgaagccagcagtgtctaaacccccggagccatcttgctgccgacaccctgctttccccatcgccctagggctcccttgccgccctcctgcagtatttatggcctc

SEQ ID NO: 94 - DNA, 564 bp, Homo sapiens
accaaggcgcgggcggtgatgaactttgtggttcgctaccggccagacgagcagccgtctctgcggccacaccacgactcatccaccttcaccctcaacgttgccctcaaccacaagggcctggactatgagggaggtggctgccgcttcctgcgctacgactgtgtgatctcctccccgaggaagggctgggcactcctgcaccccggccgcctcacccactaccacgaggggctgccaacgacctggggcacacgctacatcatggtgtcctttgtcgacccctgacactcaaccactctgccaaacctgccctgccattgtgcctttttagggggcctggcccccgtcctgggagttgggggatgggtctctctgtctccccacttcctgagttcatgttccgcgtgcctgaactgaatatgtcaccttgctcccaagacacggccctctcaggaagctcccggagtccccgcctctctcctccgcccacaggggttcgtgggcacagggcttctggggactccccgcgtgataaattattaatgttccgcagtctcactc

SEQ ID NO: 95 - DNA, 474 bp, Homo sapiens
tttgtggactccacgttctatcttcttttggacttgatcaccttttttgacgagtatcatagtggtcatattgatagagcttttgatatcattgagcgcttgaagctggtgcccctgaatcaggaaagtgtggaagagagagtggctgctttcagaaatttcagtgatgaaatcaggcacaacctctcagaagtgcttcttgccaccatgaacatcttgttcacacagtttaagaggctcaaggggacaagtccatcctcgtcatccaggccccagcgagtcatcgaggaccgcgactctcaactccgaagtcaagcccgcactctgattacctttgctggaatgataccataccgaacgtctggggacaccaatgcgaggctggtgcagatggaggtcctcatgaattaagtgccatgctttgtgggagtctgggtcggcacactgtcagtacatcaggcacatgggcccact

SEQ ID NO: 96 - DNA, 448 bp, Homo sapiens
aagcttcgagctgttgcgtgtgtgagtctgttgtgtggatgtgcgtgtgtggtccccagccccagactggattggaaaagtgcatggtgggggcctcggggctgtccccacgctgtccctttgccacaagtctgtggggcaagaggctgcaatattccgtcctgggtgtctgggctgctaacctggcctgctcaggcttcccaccctgtgcggggcacacccccaggaagggaccctggacacggctcccacgtccaggcttaaggtggatgcacttcccgcacctccagtcttctgtgtagcagctttaacccacgtttgtctgtcacgtccagtcccgagacggctgagtgaccccaagaaaggcttccccgacacccagacagaggctgcagggctggggctgggtgagggtggcgggcctgcggggacattctactgtgctaaa

SEQ ID NO: 97 - DNA, 271 bp, Homo sapiens
tcacccttctacagcagctaactagagtcctaactaatgggatccagcagggccatttctccagagggccagtatcctattaggagactcttggaattcttaggttctactcaagagtggaaggaccaatcacctctgatattctgtggaaggttttggggtcaaattctgccctctgcattctgtgcaacttgtataaaagtcaagttagtattacatgaatttggggtagggttagtgctttgaaaaaatgttgaaccggctgggcgcg

SEQ ID NO: 98 - DNA, 344 bp, Homo sapiens
  misc_feature (106)..(106): n is a, c, g, or t
  misc_feature (108)..(113): n is a, c, g, or t
gatactgtaaagtccacacacacattaaatcttgttttcctgaaagtatggcatcaaaaatacttgtagaaaaaccttgtcacaactgatttgaatgttcctattntnnnnnnctttgactttgatattggcttgtaatgtctcttttcatcatatgtaatatcagtggaacaggcagcgctactcaagtcctaaggattcctcagtgatcagtgatccagggccgttcatgaaccactgggctggatttgactgttgagtgtggcagttaatgcccctcaagaaatcaaaggatgtcttataagtgtcttccaaaaaaaagcaaatgctgaaatcctattggc

SEQ ID NO: 99 - DNA, 497 bp, Homo sapiens
ctcctgcaggccatgtgtgtattacttgtctagtgatgtcctctcaaagtgctgtacgcgagctcggcgccacctccgcctccctttcagagcctgctccccgccctctctgctcgctgcattgtggtgttctcttctcaaggctttgaaatctccccttgcactgagattagtcgtcagatctctccccgtctccctcccaacttatacgacctgatttccttaggacggaaccgcaggcacctgcgccgggcgtcttactcccgctgcttgttctgtcccctccctcggaccaaacagtgctcatgcttcaggaccttgtttgtcgaagatgttggtttccctttctctgttatttatataaaaataatttatcaaaaggatattttaaaaaagctagtctgtcttgaaacttgtttaccttaaaattatcagaatctcagtgtttgaaagtactgaagcacaaacatatatcatctctgtaccattctgtacta

SEQ ID NO: 100 - DNA, 540 bp, Homo sapiens
tagaacgggcatctactccagtacttcctgccataaaactccagataaagtaaaccatgcagtactggctgttgggtatggagaaaaaaatgggatcccttactggatcgtgaaaaactcttggggtccccagtggggaatgaacgggtacttcctcatcgagcgcggaaagaacatgtgtggcctggctgcctgcgcctcctaccccatccctctggtgtgagccgtggcagccgcagcgcagactggcggagaaggagaggaacgggcagcctgggcctgggtggaaatcctgccctggaggaagttgtggggagatccactgggacccccaacattctgccctcacctctgtgcccagcctggaaacctacagacaaggaggagttccaccatgagctcacccgtgtctatgacgcaaagatcaccagccatgtgccttagtgtccttcttaacagactcaaaccacatggaccacgaatattctttctgtccagaagggctactttccacatatagagctccagggactgtctttt

SEQ ID NO: 101 - DNA, 329 bp, Homo sapiens
gccactcgccttcttagagttttattcctttccttttttgagattttttttccgtgtgtttattttttattatttttcaagataaggagaaagaaagtacccagcaaatgggcattttacaagaagtacgaatcttatttttcctgtcctgcccgtgaggtgggggggaccgggcccctctctagggacccctcgccccagcctcattccccattctgtgtcccatgtcccgtgtctcctcggtcgccccgtgtttgcgcttgaccatgttgcactgtttgcatgcgcccgaggcagacgtctgtcaggggcttggatttcgtgtgccg

SEQ ID NO: 102 - DNA, 540 bp, Homo sapiens
cccggccaggctaagccgcagagaccctctcagcccccacctcaggttagggctctgcccgcagcctgacctctagccctggtggcagaggtccctcagctgcgaggctaattgggtgaccaccgattccagctgcggttaatccagcttgggcctgtctgcactgcgatcctcttgggctctcctaggatccccccatgccccgtaagaggtggaagacgcttccttccaggacagcaggctttggagtccgacacccccagcctgcctttgccaccagccccaaccctgcagagatatgaggcttgacagagtctgccccctcccccactgcaccccaagagagagagccccagccagcggaacagtttctattaccccctccctgcccccagacccatgtgatttctgctttcttctttagcaagatattctggtttctagataaggaagagtctctaatgagcccccgagccccagtctcttcagactcatggattggtctgaggggtctgaacgtctcctagccaatcagaactg

SEQ ID NO: 103 - DNA, 513 bp, Homo sapiens
ggtgttgtacagctcacatgtttacacactcagtgccctaatttcccctgagggaatcgctttttaagtgatccttacagtggtgttttatgttactttattacagagctccttggttttttacttctgcacttaaatttttttaaataacatgatgatggtacattttcctctattgtctagctaagggctttcggtccaccagtaaataagatcaaatgctcttaaatgttcctgttaccatcctaatgtaaatactggatttttctgtcatttagcaccatgctgcttctgtctgtcttaatgctggcattaagatcatgagccctttttctccagtagtacaggctttgaaaactacttctattaagttattgatgcaatttgatattttttcataatctatatttaaacaaaattacatcattgcatcatcttttctaaattcatctccattaaaacttgccttaagctaccagattgcttttgccaccattggccatactgtgtgtt

SEQ ID NO: 104 - DNA, 529 bp, Homo sapiens
attacggcttttctattgctgtatgatacagaactcttttggcataaatatttgtgttcccagtacctcacttgttcggatttgactgcctgtatatgttttgtgaaatggtcctgtttttgggtaggtgacacgtggactctagtatgtaaatgttacttgaatctgtgcttcataatagtgtgtggcatgtatgtgcagactcttggatgctttatgcctgcgcaccaggagccctgtcctcacgttcccaggagggcggcttcacccttcgtaaccaggagacaaggcggccatggatttgcccttgattctattttgctaatggaagatagaaaggagagaaggtttttttttttttttaacattctgaagatggtgctgtgtcaagaaggaccttttttttcccctctcccctattttttaagtaccttggaggaggagaggttggtgacatgcatggtggggatctatggcctctggtgctttgtcctgtatttggtttaatgtttttgtcctaatctcttca

SEQ ID NO: 105 - DNA, 524 bp, Homo sapiens
tggagaattctttaggttgtcccctaaagattctgaaaaagagaatcagattcctgaagaggcaggaagcagtggcttaggaaaagcaaagagaaaagcatgtcctttgcaacctgatcacacaaatgatgaaaaagaatagaactttctcattcatctttgaataacgtctccttgtttaccctggtattctagaatgtaaatttacataaatgtgtttgttccaattagctttgttgaacaggcatttaattaaaaaatttaggtttaaatttagatgttcaaaagtagttgtgaaatttgagaatttgtaagactaattatggtaacttagcttagtattcaatataatgcattgtttggtttcttttaccaaattaagtgtctagttcttgctaaaatcaagtcattgcattgtgttctaattacaagtatgttgtatttgagatttgcttagattgttgtactgctgccatttttattggtgtttgattattggaatggtgccatattgtcactccttc

SEQ ID NO: 106 - DNA, 532 bp, Homo sapiens
aaagctcaggattcttcgaaaagttgagaaaattgatgacttcaaagctgaagactttcagattgaagggtacaatccgcatccaactattaaaatggaaatggctgtttagggtgctttcaaaggagcttgaaggatattgtcagtctttaggggttgggctggatgccgaggtaaaagttctttttgctctaaaagaaaaaggaactaggtcaaaaatctgtccgtgacctatcagttattaatttttaaggatgttgccactggcaaatgtaactgtgccagttctttccataataaaaggctttgagttaactcactgagggtatctgacaatgctgaggttatgaacaaagtgaggagaatgaaatgtatgtgctcttagcaaaaacatgtatgtgcatttcaatcccacgtacttataaagaaggttggtgaatttcacaagctatttttggaatatttttagaatattttaagaatttcacaagctattccctcaaatctgagggagctgagtaacaccatcgat

SEQ ID NO: 107 - DNA, 402 bp, Homo sapiens
gtacatgaaaccccagatagactataaataattctaaacaaacaagtaggtagatatgtatgtaattgcttttaaatcatttaaatgcctttgtttttggactgtgcaaaggttggaagtgggtttgcatttctaaaatggtgacttttattctgcaagagttcttagtaacttcttgagtgtggtagactttggaacatgtaaattttttgcttgtaatgttatcctgtggtaggattttggcaggtacacacactgccctattttattttgagtctaagttaaatgttttctgaaaagagatacatgcactgaactctttccactgcgaatcaagatgtggtaatataaaaggatcaagacaaatgagatctaatactactgtcagttttaatgtccact

SEQ ID NO: 108 - DNA, 504 bp, Homo sapiens
gccactacacttcttaaggcgagcatcaaaagccggggaggttgatgttgaacagcacactttagccaagtatttgatggagctgactctcatcgactatgatatggtgcattatcatccttctaaggtagcagcagctgcttcctgcttgtctcagaaggttctaggacaaggaaaatggaacttaaagcagcagtattacacaggatacacagagaatgaagtattggaagtcatgcagcacatggccaagaatgtggtgaaagtaaatgaaaacttaactaaattcatcgccatcaagaataagtatgcaagcagcaaactcctgaagatcagcatgatccctcagctgaactcaaaagccgtcaaagaccttgcctccccactgataggaaggtcctaggctgccgtgggccctggggatgtgtgcttcattgtgccctttttcttattggtttagaactcttgattttgtacatagtcctctggtctatctcatgaaac

SEQ ID NO: 109 - DNA, 512 bp, Homo sapiens
gaagaagcctggcagacaggcgggcaaacagtgagcgcccacccagaccggctgctgcgccccctcctgccagggtggcgattccgctccacagtctcggacggatctgctcagaaaggaagaggcaggcgccagggggaacccccttcgtgttttgtgaccctcccttttaggtgaagcccctttttcttgctaaaaccggcaattctccggttagaaatgttacttggtgttttttggttttgtgaaacggccgtcccaaagctggctggattcctagaagagtctgtgttgaaggcatctttcaacccctcgctctggttctcagggcagcattttccaggcgggtttgttttgcatttcttggagcctctccgagcagcaaccagacgggagatttttattttaagctgttcatgctgggactgacagcctgcagggtttccttgggcgcggccccaaaattgccttcaaaacaaacccgggacggttgaaagccttcgaaccgtgca

SEQ ID NO: 110 - DNA, 212 bp, Homo sapiens
ccgaacgtgggcgccaatggcgagatctgcgtcaacgtgctcaagagggactggacggctgagctgggcatccgacacgtactgctgaccatcaagtgcctgctgatccaccctaaccccgagtctgcactcaacgaggaggcgggccgcctgctcttggagaactacgaggagtatgcggctcgggcccgtctgctcacagagatccacgg

SEQ ID NO: 111 - DNA, 337 bp, Homo sapiens
cggacggaagatggcgtccgccacccgtctcatccagcggctgcggaactgggcgtccgggcatgacctgcaggggaagctgcagctacgctaccaggagatctccaagcgaactcagcctcctcccaagctccctgtgggtcctagccacaagctctccaacaattactattgcactcgcgatggccgccgggaatctgtgcccccttccatcatcatgtcgtcgcagaaggcgctggtgtcaggcaagccagcagagagctctgctgtagctgccactgagaagaaggcggtgactccagctcctcccataaagaggtgggagctgtcctcggac

SEQ ID NO: 112 - DNA, 330 bp, Homo sapiens
agccctacacatttgacatcaacctctctgttaacctgaaaggagaaggaatgagccaggcggctaccatatgcaagtccaattttaagtacatgtactggacgatgctgcagcagctcactcaccactctgtcaacggctgcaacctgcggccgggggacctcctggcttctgggaccatcagcgggccggagccagaaaacttcggctccatgttggaactgtcgtggaagggaacgaagcccatagacctggggaatggtcagaccaggaagtttctgctggacggggatgaagtcatcataacagggtactgccagggggatggtt

SEQ ID NO: 113 - DNA, 454 bp, Homo sapiens
ggcctcttgcctgtaaatagaagcccgcaaactgtacagatttacagaggcatcgagactgggccctgggagttgccatctgagagccgatggccccagcatcccccaggtgcctgcctggcaccacagtgaccctggcctcagcgtggcaaatgcatgtaaatatttttcgtaggcagcgtggctccagagagccccctgaagacagtgtccctccctcctgtgagtcctttctcctgtacagaacctgcctggggtgggtgggggtctgccattccctcccccaggccttccctgccccttctctcccctgtaacctgtttattaaccatacctgtcctgagttcatggccaaaaccttaaataagaaaaacaaaagaaaaagacagtggaaaaaagagaccaaggcgcctgccccactgcgggtactctcctgttccagccttgtgaagga

SEQ ID NO: 114 - DNA, 459 bp, Homo sapiens
gccttccctgaatcagacaaccttttcaaatgggtagggaccatccatggagcagctggaacagtatatgaagacctgaggtataagctctcgctagagttccccagtggctacccttacaatgcgcccacagtgaagttcctcacgccctgctatcaccccaacgtggacacccagggtaacatatgcctggacatcctgaaggaaaagtggtctgccctgtatgatgtcaggaccattctgctctccatccagagccttctaggagaacccaacattgatagtcccttgaacacacatgctgccgagctctggaaaaaccccacagcttttaagaagtacctgcaagaaacctactcaaagcaggtcaccagccaggagccctgacccaggctgcccagcctgtccttgtgtcgtctttttaatttttccttagatggtctgtcctttttgtgattt

SEQ ID NO: 115 - DNA, 371 bp, Homo sapiens
cactaagaaaatacctccctgggaggatgagctggggccctttttcttttgctggatggttcctttatgcagcttggccctgtctaccgagatgcccatctcttcctgcctgctagcctgctagaccctcaaactgggtgggttctgtgtcaataaaaagcttcaccccctggctgagtgaggtggtcccctgcaatcactgtttgtcccctacccacccaacctgtccctgcctgctcccagcccactcatccttatgtgctagggataaatcaagagtcctcagcactccacattcccaaaaaatcccaggaactcctaaaccttcccctgtgacagaagatgaggttggcagctgatcagacctcaat

SEQ ID NO: 116 - DNA, 319 bp, Homo sapiens
tggaggtcaaactgggggagctgccaagctggatcttgatgcgggacttcagtcctagtggcattttcggagcgtttcaaagaggttactaccggtactacaacaagtacatcaatgtgaagaaggggagcatctcggggattaccatggtgctggcatgctacgtgctctttagctactccttttcctacaagcatctcaagcacgagcggctccgcaaataccactgaagaggacacactctgcacccccccaccccacgaccttggcccgagcccctccgtgaggaacacaatctcaatcgttgctgaatcctttc

SEQ ID NO: 117 - DNA, 352 bp, Homo sapiens
gaagtgtcctttatattaccagaaaatatgggcttggcctaagtcgctgtctcctaacctgccggggtcattccccaccaaacaccccatactaaggagccatgagccacctggacattcaccttttctttgaccatctggagtctggggcaacttaaggaggcaccacacagtggtgcaggcacatttccaagcgtaggtgtccctggcttttgtggccaaagctagtgttatggtcaacaacaggccagggtctgtggggcactgaccttgaaagtggcaaaatggaggtttcacaggctgtgcgggagcaggacggcttgcttcatctaacaatctcagtttcctttaa

SEQ ID NO: 118 - DNA, 487 bp, Homo sapiens
aaaagcactctcatcagatatctgacataattagatacaatataacattttactaagttcagtattcatgttttaaaggtgtttatactgatttgattgtgctggcaaatatactgtattgttaatattgaactgtttatttttctcttagtcttcttatttaattaacttcattgccgctggattctgttcagcctttaaaaatatttcttagtggtcattgctctgcagaactcaaaaagaaaattgtacttgttcatagacatttttaaagggttaatttattgttcagccttatcccttggcacgtaaacagactactagacttattgtaggttcgtttgagctttgtgttgtaaaattaaaaatgcttctataaagttttcaaggtagggagtgattttattattgtgtatatctaatatattaagtatgtgtgatactaaggtttgactgctataattatttgtactgttgatcacatgta

SEQ ID NO: 119 - DNA, 476 bp, Homo sapiens
cgtgaacgtcacccaggtattcgtggacaccgtagggatgccagagacataccaggcgcagctgcagcaaagttttcccgggattgaggtgacggtcaaggccaaagcagatgccctctacccggtggttagtgctgccagcatctgtgccaaggtggcccgggaccaggccgtgaagaaatggcagttcgtggagaaactgcaggacttggatactgattatggctcaggctaccccaatgatcccaagacaaaagcgtggttgaaggagcacgtggagcctgtgttcggcttcccccagtttgtccggttcagctggcgcacggcccagaccatcctggagaaagaggcggaagatgttatatgggaggactcagcatccgagaatcaggagggactcaggaagatcacatcctacttcctcaatgaagggtcccaagcccgtccccgttcttcccaccgatatttcctggaac

SEQ ID NO: 120 - DNA, 419 bp, Homo sapiens
ctggcagctcctctgagtggggagaggttgggcagtgagtgagggacccctaatgcagggactagaagcctcagtttccccattttacccttccacacaatagcctctgtaggttaggctgccccatcccaccctactctgtgtggctgctttctttggtgccctcccctcaccccactgtagctgtgacgtgttgtagtttttagatgtttgtaaaatgtttaaaaaaatgttaaaaggaaaaaagtgaaaataacaaaaaagaaaatcaaaattcaccttcgtcatgctgcgtccagtgccccaaccctgtggtcactctccccattttgtaacactgtaccaggtggtgactgtttaactctttggtgtctgtgctcaaaagactgccttctccagtgcccagtgtatgagtgtgt

SEQ ID NO: 121 - DNA, 438 bp, Homo sapiens
gcccctggagtcgcggagaaagggccgtaaccggaggacccacgcccctgagcctcgcgctgagcgggggccgcgcagcgcaacgcactggtgaccagactgtccccacgccgggaaccaagcaggagacgacaggcgagagaggagccagacagaccctgaaaagaaggacgggttggggccgggcacattgggggtcaccggccgatggagacaccaaccgacaggccctggctgagggcagctgcgcgggcttatttattaacaggataacccttgaatgtagcagccccgggagggcggcacaggtcgggcgcaggattcagccggagggaagggacggggaagccgagctccagagcaacgaccagggccgaggaggtgcctggagtgcccaccctgggagacagaccccacctccttgggtagtgagcagtg

SEQ ID NO: 122 - DNA, 471 bp, Homo sapiens
gattggtttcgacccaagctcaactatcgagtgcccagccggggccataaactgactgtgaccctgtcatgtggcagaccttccatccgaaccacggcttgggaagactacatttggttccaggcaccagtgacatttaaaggcttccgcgagtgaatgagtgcttcttaatcctaaaaacacaatggctgaattatctttctccatgtggcgctgaatcacccatctggtttggagctagagttgcttcctggtgagagaggaagcaactctccttctggttgtctgcctcccctcagatttcctgataggctgatggcatgtggctgtgactgtgactgtaatcattgctgaacaacatctctttgaatcaaaggttgattttcccagagggtgctgggtcaggcatttctattaggagttggaaagcaaaaatgggtccatagacactctatggaggtgtccctttct

SEQ ID NO: 123 - DNA, 475 bp, Homo sapiens
gagtggcgagctcataagccttagagaggaggtgacccaccttacccgctcacttcggcgtgcggagacagagaccaaagtgctccaggaggcctggcaggccagctggactccaactgccagcctatggccaccaattggatccaggagaaagtgtggctctctcaggaggtggacaaactgagagtgatgttcctggagatgaaaaatgagaaggaaaactcctgatcaagttccagagcccatagaaatatcctagaggagaaccttcggcgctctgacaaggagttagaaaaactagatgacattgttcagcatatttataagaccctgctctctattccagaggtggtgaggggatgcaaagaactacagggattgctggaatttctgagctaagaaactgaaagccagaatttgtttcacctctttttacctgcaatacccccttaccccaataccaagaccaactggc

SEQ ID NO: 124 - DNA, 482 bp, Homo sapiens
tatagagtttatctacacggccccctcctcggcagtgtgtggggtctcgctggacgttggaggaaagaaggaatatctcattgcaggaaaggccgagggggacggcaagatgcacatcaccctctgtgacttcatcgtgccctgggacaccctgagcaccacccagaagaagagcctgaaccacaggtaccagatgggctgcgagtgcaagatcacgcgctgccccatgatcccgtgctacatctcctccccggacgagtgcctctggatggactgggtcacagagaagaacatcaacgggcaccaggccaagttcttcgcctgcatcaagagaagtgacggctcctgtgcgtggtaccgcggcgcggcgccccccaagcaggagtttctcgacatcgaggacccataagcaggcctccaacgcccctgtggccaactgcaaaaaaagcctccaagggtttcgactggtccagctctgacat

SEQ ID NO: 125 - DNA, 530 bp, Homo sapiens
tgcttggtgtgacccacggaggatccactcccaggatgacgtgctccgtagctctgctgctgatactgggtctgcgatgcagcggcgtgaggcctgggctggttggagaaggtcacaacccttctctgttggtctgccttctgctgaaagactcgagaaccaaccagggaagctgtcctggaggtccctggtcggagagggacatagaatctgtgacctctgacaactgtgaagccaccctgggctacagaaaccacagtcttcccagcaattattacaattcttgaattccttggggattttttactgccctttcaaagcacttaagtgttagatctaacgtgttccagtgtctgtctgaggtgacttaaaaaatcagaacaaaacttctattatccagagtcatgggagagtacaccctttccaggaataatgttttgggaaacactgaaatgaaatcttcccagtattataaattgtgtatttaaaaaaaagaaacttttctgaatgcctacctggcggtgtatacc

SEQ ID NO: 126 - DNA, 504 bp, Homo sapiens
tccgcattggcacttctggtgggataggtctggagcccggcactgtggtcataacagagcaggcagtggatacctgcttcaaggcagagtttgagcagattgtcctggggaagcgggtcatccggaaaacggaccttaacaagaagctggtgcaggagctgttgctgtgttctgcagagctgagcgagttcaccacagtggtggggaacaccatgtgcaccttggacttctatgaagggcaaggccgtctggatggggctctctgctcctacacggagaaggacaagcaggcgtatctggaggcagcctatgcagccggcgtccgcaatatcgagatggagtcctcggtgtttgccgccatgtgcagcgcctgcggcctccaagcggccgtggtgtgtgtcaccctcctgaaccgcctggaaggggaccagatcagcagccctcgcaatgtgctcagcgagtaccagcagaggccgcagcggctggtgagctacttcatcaaga

SEQ ID NO: 127 - DNA, 477 bp, Homo sapiens
gtggccgtagcaacttggcggagacaggctatgagtctgacgttagagtggttgcttccttagcctttcaggatggaggaatgtgggcagtttgacttcagcactgaaaacctctccacctgggccagggttgcctcagaggccaagtttccagaagcctcttacctgccgtaaaatgctcaaccctgtgtcctgggcctgggcctgctgtgactgacctacagtggactttctctctggaatggaaccttcttaggcctcctggtgcaacttaatttttttttttaatgctatcttcaaaacgttagagaaagttcttcaaaagtgcagcccagagctgctgggcccactggccgtcctgcatttctggtttccagaccccaatgcctcccattcggatggatctctgcgtttttatactgagtgtgcctaggttgccccttattttttattttccctgttgcgttgctatagatg

SEQ ID NO: 128 - DNA, 460 bp, Homo sapiens
gttcctgcagaaggcgctcgagatccttcggaaagacttcagtgagctgaggtccgcaggggtggagcagctcatgtacatcaaggaggacttgatcatccctcaccatcacagcttctacgacttcatcgtcaccaaggcacgggggaagagtggaccactcttcaactttgatgttcatgacgatgtgcggttgctcagtgacgccactgtggagaaggatgagtcccatgcaggcaaggtggtgctgaggagctggtacgagaagaacaagcacatctttcccgccagccgctgggaaccctacgaccctgaaaagaagtgggacaagtacacgatccgctgagcatccaggaggctgcgcggccccggctcctcagctccctcagtgtgccccgtggtgtcaccgggactccaggcacccgctcccctgcgaccatgccaggcacgctgggaggag

SEQ ID NO: 129 - DNA, 526 bp, Homo sapiens
gaacttgttcagaccgttttagcacggaaacctaaaatgtgcagcttccttgagtggcgagatctgaagattgtttacaaaagatatgctagtctgtatttttgctgtgctattgaggatcaggacaatgaactaattaccctggaaataattcatcgttatgtggaattacttgacaagtatttcggcagtgtctgtgaactagatatcatctttaattttgagaaggcttattttattttggatgagtttcttttgggaggggaagttcaggaaacatccaagaaaaatgtccttaaagcaattgagcaggctgatctactgcaggaggaagctgaaaccccacgtagtgttcttgaagaaattggactgacataactctcctcccttgttgatgacttcttgtggcatttcacacactgtagatggtcactcccttcatgtccatgttagctcatggtgtaagatgatgtcttgtcagtattactgttttgctaagccgcttcattcatgcctacacaatttt

SEQ ID NO: 130 - DNA, 463 bp, Homo sapiens
gggaaccggtgactcagaaagacagatgttttggtaatttaccccaaatgtgccatccacatagtgctttttcctcttgcccttcggcttgtttgaatctcacaattatgtatttaattctcaaagaaatatgtatctgtagccgtttgttgacactaatacagatgattaaggaaaacagctgatctttggggaagggagctaccaacactttatacacacacacacgtgcacacacacacacacactatatatatatattatttacagggaaatttttcagggtttacaaaagagtatgtgattggtagtaagagacacacagaatgtttatgaagaaattgcattttctttttcctttacatttgaacttctttatagtttaaatataacgtcttgagatggcacattcctacgattgaagaaggggtcttgagatcccctaaacttgcatacccagttt

SEQ ID NO: 131 - DNA, 255 bp, Homo sapiens
ccgtggagcttcatcggggtggtgcaggctcccaaactcaggctttcagctgtgctttttgcaaaagggcttgcctaaggccagccatttttcagtagcaggacctgccaagaagattccttctaactgaaggtgcagttgaattcagtgggttcagaaccaagatgccaacatcggtgtggactacaggacaaggggcattgttgcttgttgggtaaaaatgaagcagaagccccaaagttcacattaactcag

SEQ ID NO: 132 - DNA, 560 bp, Homo sapiens
ggctttcagctctatcagagtgaccctagtggaaattacgggggatggaaggccacatgcattggaaataatagcgctgcagctgtgtcaatgttgaaacaagactataaagaaggagaaatgaccttgaagtcagcacttgctttagctatcaaagtactaaataagaccatggatgttagtaaactctctgctgaaaaagtggaaattgcaacactaacaagagagaatggaaagacagtaatcagagttctcaaacaaaaagaagtggagcagttgatcaaaaaacatgaggaagaagaagccaaagctgagcgtgagaagaaagaaaaagaacagaaagaaaaggataaatagaatcagagattttattactcatttggggcaccatttcagtgtaaaagcagtcctactcttccacactaggaaggctttactttttttaactggtgcagtgggaaaataggacattacatactgaattgggtccttgtcatttctgtccaattgaatactttattgtaacgatgatggttacccttcatggacgtcttaatctt

SEQ ID NO: 133 - DNA, 470 bp, Homo sapiens
ttctgagccaccttgtggatcccaaggacctggagccacgggctgccaactgcactcgggtactggtgtggcatactcggacagagaagcccaagatgaagcaggaggagcagctgcagcggcagggccggggctcagacccagcaattgaggtgtgatggcggccccaccccaactaccacctcttttcaggcacagaccttgtgggactgggccccaggcctgcccaggatgtggttttccaagtcctgacccttggagccagaagtggcccctctgcccctccaggcccagggcatggtcctgctgcttcacccctcccctagcctgccgtgtggcactgcccacaggctggggacaagcagcccttgtgttgagtcaggttggccctgtctagggtggaacagaaggacagatggacccaggagggagggcagctgagtaactgggtaacttattggggctgggca

SEQ ID NO: 134 - DNA, 541 bp, Homo sapiens
aaaacaggacatctgtgaccgccctacccccacgccagccccaaactaagatatccctcacacccagcccccattacctagggacaagagtcttccccagccttgaacctaggaccaagagccacctacatccagccccaaaactggggcttcaggccagagcatccatggccaatttcaaattgtgaacccagagacactcccatccacccttctccatgctcatccccaaactggggcctggagcaaggcactctcaaatcttgaaccctggaccaaagcttttccagaccccaccctaccttccaacccaggtcaagacattgccaaatcttgaactcagaacccaagtgttccatgcccctgtgtggatggagtcgggtatcctgactgttggacccctggtccaggtgatcccgaccctcaccagtcccatttgcctccctccagctctgcttaggcattttgcccctcaccccaatgttccacaccatcgacaaccaaggggtgaggtggggacaggcctcagcagggaatgggg

SEQ ID NO: 135 - DNA, 501 bp, Homo sapiens
tatgagttagctttcttgctagccccctagtcggtcaccaaactagtaactagtggggcttaatgaaggtcataagtttctgagatgggagagcaacaagtagagatgaagttaaaggtatttatcattcaagaaatcattattgagtcaccaattgacaggcactattctaatcagtagttcactttaatatttaataagattttctgggataacagtaagggatattagataatataccgtatgtatttattactagtcttttcctctaggaaaagggatactttgataattaaggccagaggcccattagttgagaaagtcacagatatatttctccaagaaagccaacaaccaccaccacaatgacagaaatgacaacaaggccctttaacttgtcttctagtttagagacatccttcatttgacatttagtagaattcctctttggccacaagaataagcagcaaataaacaactatggctgttgaggttctcatt

SEQ ID NO: 136 - DNA, 533 bp, Homo sapiens
ttccaaagtctctgctgtcaagatagattcgagagaaagcacgtggccatgtatgctttaaccttaaactgcatacacatgtagtgatacctaggctgcatttagatcaccgtgtgctcaggccaggtgtgaatcctgaggtccatggaggtgcagagatgagattactcctattcacgttgaagtgatttgctttgttaacaaaaaattgcagctattgtctagctttcatttttttactgagaactttaaattagtcccctattagaatagggttgctactcatctttttttaaaaaccgaatttcatcatttatctaaagagaaaatatgcagaataactggtcttgttaagagtgcaatattatatttttatgtaaaaataaaaattaatttggggggattatttattcagcatgaaacctaatatgtatatgtttgaaatacttcataatgtgcatgttgtagcaaacatttctgtaaattatcacaagctctgttacctttatatacgctgcctcttcaatttggaa

SEQ ID NO: 137 - DNA, 351 bp, Homo sapiens
aaaacagccaagcttttctgccaaaaagatgactgagaagactgttaaagcaaaaagctctgttcctgcctcagatgatgcctatccagaaatagaaaaattctttcccttcaatcctctagactttgagagttttgacctgcctgaagagcaccagattgcgcacctccccttgagtggagtgcctctcatgatccttgacgaggagagagagcttgaaaagctgtttcagctgggccccccttcacctgtgaagatgccctctccaccatgggaatccaatctgttgcagtctccttcaagcattctgtcgaccctggatgttgaattgccacctgtttgctgtgacat

SEQ ID NO: 138 - DNA, 542 bp, Homo sapiens
ggcaaagcacacaggctgagcgctgaggagagggaccagctgctgccaaacctgagggctgtggggtggaatgagctggaaggccgtgatgccatcttcaagcagtttcatttcaaagacttcaacagggcctttgggttcatgacaagagtggccctgcaggctgagaaactggaccaccatcctgaatggtttaacgtgtacaacaaggtccacatcacgctgagcacccatgagtgtgccggcctttcagaacgggacataaacctggccagcttcatcgaacaagtagcagtgtccatgacatagaccctgcccttcctctttgaattcttccgggggaaggggtgactgaactgggagtccagggagggagctgaggagcccttaccctcccaccactcccctcccaagacccagccgccgccgttgagggctgagtccttgctgtgggatgtgccagtgtccccaccaacaccaggaatttagaccttttccctgcaccactctcttcatcctgggggctctgttacactaatttg

SEQ ID NO: 139 - DNA, 549 bp, Homo sapiens
ctggaggacagcacctgtgacttcggcaacctcaagcgctatgcatgcacctctcatacccagggcctgagcccaggctgctatgacacctacaatgcggacatcgactgccagtggatcgacataaccgacgtgcagcctgggaactacatcctcaaggtgcacgtgaacccaaagtatattgttttggagtctgacttcaccaacaacgtggtgagatgcaacattcactacacaggtcgctacgtttctgcaacaaactgcaaaattgtccaatcctgatctccgggagggacagatggccaatctctccccttccaaagcaggccctgctccccgggcagcctcccgccgaggggcccagcccccaacccacaggcagggaggggcatccctccctgccggcctcagggagcgaacgtggatgaaaaccacagggattccggatgccagaccccattttatacttcacttttctctacagtgttgttttgttgttgttggtttttattttttatactttggccataccacagagctagattgccc

SEQ ID NO: 140 - DNA, 558 bp, Homo sapiens
acctcccgtgagaaagctggtccacgacaaagagttggcagcagaagatgagcaggtgttcctaatgaagcaacagtcactccttgccaagcaaccagccactcccacgagagcttctgaatctcctgcaagaggaccctctggctctccaaggacccagggtcggggagggccagccagtgtgcctagctcctccccaggcacgtcagtaaaaaagccggacccaaacatcaaaaataatgcagcaagtgaaggggtgttggccagcttcttcaacagtctgttgagtaaaaagacaggctctcctggaagtcctggtgctggtggggtgcagagcacagccaagaagtcaggacaaaagactgtgttgtcaaatgttcaggaagaactggatagaatgactcgaaagccagactctatggtaacaaactcttcaacagaaaatgaagcctgaacctccttaaaaagtgcatatgtcgaatgaccaaataactatgtatattgatctgctaagaccaggatttttctgatatggcacatgctatcagttttttgggg

SEQ ID NO: 141 - DNA, 518 bp, Homo sapiens
tgaggctttggccttaacacccaggaacttttctattacaatcgcttaggaagtaaagccttgtctccctccctgttctctgcctcttgtacccctctgacccacccgctctgccccactcccagccctcctcagccccagccctgcctgccctgcccctccagggggccatgagtgcctaggtttctcataccccacaaggtcacagcaggggagggagggacaattttataatgaaccaaaaattccatgtgttggggggtggggggcggaggagggtgaggggtgccgcccatgggccacaaatctctacaagtgcctgctatccctctcccactccccaccccagcaccggtccaaccccttcatccccagctgctcctaggactggcccatgggcaggcgggtggggggatgggaagggggtgccctgaaaccaaactggaagccccctctgcctcccagctggggcctctggggtggggtggggggctgtggtcaagccttattctgtattg

SEQ ID NO: 142 - DNA, 433 bp, Homo sapiens
gtttgatgctcgctgggtaacatacttcaacaagccagatatagatgcctgggaattgcgtaaagggataaacacacttgttacctatgatatggttccagagcccaaaatcattgatgctgctttgcgggcatgcagacggttaaatgattttgctagtctagttcgaatcctagaggttgttaaggacaaagcaggacctcataaggaaatctacccctatgtcatccaggaacttagaccaactttaaatgaactgggaatctccactccggaggaactgggccttgacaaagtgtaaaccgcatggatgggcttccccaaggatttattgacattgctacttgagtgtgaacagttacctggaaatactgatgataacatattaccttattttgaacaagtttccctttattgagtaccaagccatgta

SEQ ID NO: 143 - DNA, 512 bp, Homo sapiens
ccacgagttcacctatgcactgatgccgcacaagggctctttccaggatgctggcgttatccaagctgcctacagcctaaacttccccctgttggctctgccagcccccagcccagcgcccgccacctcctggagtgcgttttccgtgtcttcacccgcggtcgtattggagaccgtcaagcaggcggagagcagcccccagcgccgctcgctggtcctgaggctgtatgaggcccacggcagccacgtggactgctggctgcacttgtcgctgccggttcaggaggccatcctctgcgatctcttggagcgaccagaccctgctggccacttgacttcgggacaaccgcctgaagctcaccttttctcccttccaagtgctgtccctgttgctcgtgcttcagcctccgccacactgagtccctggggctggggttttgtttgtagaaggctctggggactcctaatttctgcttccccagcctaaagcagggatcagtcttttcttgtgg

SEQ ID NO: 144 - DNA, 500 bp, Homo sapiens
aacactgccagaatactttctagctgctttgtaattttttaagagtgttattttgtttttgtttttctgttctttgttgtggctcttgttttcatttttgttgtacgtgtagatctgtaaataaaattgcagtatttaaagcttaagctttcaggaaaaagaaaataagaattcagtgtgtgcatgacaactcgtgtgtatgagaaggagggatatgaaggaagatggcttgcagagtaagtcgggtggcaattgtcagggtgtgggaatttcttttcctacggggtacgtgattttgtaaaaaggaagtatttctcccaaaattgggagtaggcaaactactaatcagtttagctttgtgttgtatgctagtttaaaaaagaaaatatgtaatataatgtaaaaaaaaacaaaaaaaagcttttatgatggattttgtaaatagatttgttacagggtgacctgttctctagctgtgatcttaccacttcaaatgggtg

SEQ ID NO: 145 - DNA, 512 bp, Homo sapiens
tgaatgacctgacttttagccaccaggtactctttaaacagttttccttatcagaggccctcctgtgctggtgacccagcatctgagttaggttccagcatgtaaagagctgggagggcggagaattcttagcatacattcagacgttttttctgcacaataataagtccatctgtcacttgcattccactttttgttacatagaaagagtctgaccctttaatccaaaaggtctttttacattgtgaatgctgtgggaaggcaatttctctgcacacaagaggctacgttttggaagtgatgtatgttatttgatgactgaaaatgaactgtaaatgctcctagagtatattcctctgctgaacaaaattaaacttcaaaaaaatctaacagtaacacacccctgcttgggaccctagctatatgcattttatgtgaccttgccatgcttcagtgaacatactaattctatgtctagcacatgttgatttcctatgtattctgggtattct

SEQ ID NO: 146 - DNA, 562 bp, Homo sapiens
aggacaaactctgtgtacctgtgcccaggtgaatgggcgcagggtcctcttgccctgtcctgcggggggccccacgagttcctggcattcagcactgcttagcattctcggaaggtttcttcaactgcttgcttttcccaggcttgcctttagtgtcatgtaagacatttttaagttatatttattttgttgggttttaaaattgcacagaacactaagaccgaaaggctggactcttgtttctccttgaaagctttgcctttgttttgaacttcctttcccacttggtagaaagagcccagaagcagccctggccctgtaagatggactctttcatccttcagttgtatttagctttgagtttctctgcatctgtccaccccatgtgtatataacccagcccctggctctggggtggtcacctcgtcagtgccttttgttctggaggagaggacccccccgcctgccgagaggctctcttcctgttctgcacccctctccccatgggaccttggagaaaactgaactgttacaaacccctgcacagtgcctgtcaaacaga

SEQ ID NO: 147 - DNA, 465 bp, Homo sapiens
atcctcattcttatactgcttttcgtggccactttggacaagtcctggtggactctccctgggaaagagtccctgaatctctggtacgactgcacgtggaacaacgacaccaaaacatgggcctgcagtaatgtcagcgagaatggctggctgaaggcggtgcaggtcctcatggtgctctccctcattctctgctgtctctccttcatcctgttcatgttccagctctacaccatgcgacgaggaggtctcttctatgccaccggcctctgccagctttgcaccagcgtggcggtgtttactggcgccttgatctatgccattcacgccgaggagatcctggagaagcacccgcgagggggcagcttcggatactgcttcgccctggcctgggtggccttccccctcgccctggtcagcggcatcatctacatccacctacggaagcgggagtgagcgccccgc

SEQ ID NO: 148 - DNA, 493 bp, Homo sapiens
ggagttgtagcctctttaaacacctgagaagccatgagaggacagatcccataaataccttaagtgtagaggggtctctgttgtagaatagctcttaattttagagaaaccttcctggagggaaaccatactcctataatgagcaaagtaacaacttcaagcatttttccagcgttaccatcaaactcacaaataggttgaaatcctttagttataactcagcctttaggaacaccggagaacccacaataatagaaatcttttcgtgttccccattgagaaatgctttagttagcatcttcatgcttggaaatctagacaagaagagaatccatggatggacatggtcgaggaattcggaaagcctgcagttgacattcagtcttcacttgaaactcaaaactgacactaggaacagcttcatgagttcagtagaagtaagctttatttgtagcttctgccttgtttgacggcgtatctattcagggaagcg

SEQ ID NO: 149 - DNA, 480 bp, Homo sapiens
caggcaggaggtcctgttagccctgccttccaggaaggttggggtgggagttttgagtgggaaagaggatgacatgtgtgagagagttctgagcctgtttgctagggagagtgagtgagtgctcttgggcactgctcaggccgtttctgctgacttgcctggcttacaataaatgcccaataaatatttgttgaccatatgtgttgtacactgtggtgccctgtccagtcccctctaccaagctgagacccccatccccagctgctctgagtttgggctgcaagtgctcacagctcttgttctccagaaactggagaattgccctcaggagatgagagccatctcacctcacccaggagtcacttcctctctacaccccaacacctggttcatttgattaaagcggagaaaactccagggtgctatgactgctctggcacccttggatcaggccaagctagactttttctgagccttcat

SEQ ID NO: 150 - DNA, 483 bp, Homo sapiens
attcagcctggcttcaaattgtaagcatgcacaaattctgtctctggattatattatgaagcttttatgtgaaacatgtttctttgtaatgaaaaccacattggagatgtttagtaatcatattgttactggtaccaagactactagggaaatgcctttgtactttagggaagtacttttggcattttactgtacagacagaaaaaactgagatgtagcccctctcctggaagtgctaattttgaaaaactgctcatatgatgtacatgtactgattactgcctattttaataaacactcttgaaaaatgcatgttgccctgttgctgcctgccctattctcctcatctccccatcattggtacccacttgcttttaaaatccactttatcttgaataatgtaagacaaatatgttctgacataagtatttaattcatgttgccttgcataatggtcagaggcgcatgaatttgtgaaggtgg

SEQ ID NO: 151 - DNA, 145 bp, Homo sapiens
ttcctgaacatgagtttgcgacgggaccagtgtgtcttgatgatgagaatgagtttcctcctataatcttgtgccgtggaaatcagaagggcaaaacgaagcagtcatgatgagaagcacacctcagaaatcaggacatcccccc

SEQ ID NO: 152 - DNA, 539 bp, Homo sapiens
tgccagcgactgtctcagactgggcagggaggctttggcatgacttaagaggaagggcagtcttgggacccgctatgcaggtcctggcaaacctggctgccctgtctcatccctgtccctcagggtagcaccatggcaggactgggggaactggagtgtccttgctgtatccctgttgtgaggttccttccaggggctggcactgaagcaagggtgctggggccccatggccttcagccctggctgagcaactgggctgtagggcagggccacttcctgaggtcaggtcttggtaggtgcctgcatctgtctgccttctggctgacaatcctggaaatctgttctccagaatccaggccaaaaagttcacagtcaaatggggaggggtattcttcatgcaggagaccccaggccctggaggctgcaacatacctcaatcctgtcccaggccggatcctcctgaagcccttttcgcagcactgctatcctccaaagccattgtaaatgtgtgtacagtgtgtataaaccttcttcttctt

SEQ ID NO: 153 - DNA, 390 bp, Homo sapiens
gaaggtgtggttttcatttctcagtcaccaacagatgaataattatgcttaataataaagtatttattaagactttcttcagagtatgaaagtacaaaaagtctagttacagtggatttagaatatatttatgttgatgtcaaacagctgagcaccgtagcatgcagatgtcaaggcagttaggaagtaaatggtgtcttgtagatatgtgcaaggtagcatgatgagcaacttgagtttgttgccactgagaagcaggcgggttgggtgggaggaggaagaaagggaagaattaggtttgaattgctttttaaaaaaaaaagaaaagaaaaagacagcatctcactatgttgccaaggctcatcttgagaagcaggcgggttgggtggg

SEQ ID NO: 154 - DNA, 398 bp, Homo sapiens
ggctcccagcaagggtaggacgggccgcatgcgggcagaaagttgggactgagcagctgggagcaggcgaccgagctccttccccatcatttctccttggccaacgacgaggccagccagaatggcaataaggactccgaatacataataaaagcaaacagaacactccaacttagagcaataacggctgccgcagcagccagggaagaccttggtttggtttatgtgtcagtttcacttttccgatagaaatttcttacctcatttttttaagcagtaaggcttgaagtgatgaaacccacagatcctagcaaatgtgcccaaccagctttactaaagggggaggaagggagggcaaagggatgagaagacaagtttcccagaagtgcctggttctg

SEQ ID NO: 155 - DNA, 562 bp, Homo sapiens
gaagaaccatcgaaacctgtttgttcccagcccacccccagtggatgggatgcataatgccagcaagttttgtttaacagcaaaaaaggaagattaatgcaggtgttatagaagccagaagagaaactgtgtcaccctaaagaagcatataatcatagcattaaaaatgcacacattactccaggtggaaggtggcaattgctttctgatatcagctcgtttgatttagtgcaaaaatgttttcaagactatttaatggatgtaaaaaagcctatttctacattataccaactgagaaaaaaatggtcggtaaagtgttctttcataataaataatcaagacatggtcccatttgcaggaaaagtgcagactctgagtgttccagggaaacacatgctggacatcccttgtaacccggtatgggcgcccctgcattgctgggatgtttctgcccacggttttgtttgtgcaataacgttatcacatttctaatgaggattcacattaatataatataaaataaataggtcagttactggtctctttctgccgaatgttatgt

SEQ ID NO: 156 - DNA, 268 bp, Homo sapiens
tgccctgaccccgatcagttaaggagctgtgcaataaccttcctagtacctgagtgagtgtgtaacttattgggttggcgaagcctggtaaagctgttggaatgagtatgtgattctttttaagtatgaaaataaagatatatgtacagacttgtattttttctctggtggcattcctttaggaatgctgtgtgtctgtccggcaccccggtaggcctgattgggtttctagtcctccttaaccacttatctcccatatgagagtgtg

SEQ ID NO: 157 - DNA, 490 bp, Homo sapiens
ccctgacccaattgtcatcaaccatgtcatcagcgtggacccttcagaccagaagaagacagcgtgctatgacattgacgtggaggtggaggagccattaaaggggcagatgagcagcttcctcctatccacggccaaccagcaggagatcagtcctctggacagtaagatccatgagacgattgagtccataaaccagctcaagatccagagggacttcatgctaagcttctccagagaccccaaaggctatgtccaagacctgctccgctcccagagccgggacctcaaggtgatgacagatgtagccggcaaccctgaagaggagcgccgggctgagttctaccaccagccctggtcccaggaggccgtcagtcgctacttctactgcaagatccagcagcgcaggcaggagctggagcagtcgctggttgtgcgcaacacctaggagcccaaaaacaagcagcacgacggaactttcagccgtgtc

SEQ ID NO: 158 - DNA, 496 bp, Homo sapiens
cgctctcgtttcattttctgcagcgcgccacgaggatggcccacaagcagatctactactcggacaagtacttcgacgaacactacgagtaccggcatgttatgttacccagagaactttccaaacaagtacctaaaactcatctgatgtctgaagaggagtggaggagacttggtgtccaacagagtctaggctgggttcattacatgattcatgagccagaaccacatattcttctctttagacgacctcttccaaaagatcaacaaaaatgaagtttatctggggatcgtcaaatctttttcaaatttaatgtatatgtgtatataaggtagtattcagtgaatacttgagaaatgtacaaatctttcatccatacctgtgcatgagctgtattcttcacagcaacagagctcagttaaatgcaactgcaagtaggttactgtaagatgtttaagataaaagttcttccagtcagtttttctcttaagtgcct

SEQ ID NO: 159 - DNA, 508 bp, Homo sapiens
atccattgtccttgtagtttcttccctcctgttctctggttatagctggtcccaggtcagcgtgggaggcacctttgggttcccagtgcccagcactttgtagtctcatcccagattactaacccttcctgatcctggagaggcagggatagtaaataaattgctcttcctaccccatcccccatcccctgacaaaaagtgacggcagccgtactgagtctgtaaggcccaaagtgggtacagacagcctgggctggtaaaagtaggtccttatttacaaggctgcgttaaagttgtactaggcaaacacactgatgtaggaagcacgaggaaaggaagacgttttgatatagtgttactgtgagcctgtcagtagtgggtaccaatcttttgtgacatattgtcatgctgaggtgtgacacctgctgcactcatctgatgtaaaaccatcccagagctggcgagaggatggagctgggtggaaactgctttgcactatcgtttgctt

SEQ ID NO: 160 - DNA, 370 bp, Homo sapiens
  misc_feature (251)..(251): n is a, c, g, or t
gaagatgagtctatggcatcaggttcttaaacccaggaaagcacctacagaccggctcctccatgcactttaccagctcaacgcatccactctctgttctcttggcagggcgggggaggggggataggaggtcccctttcccctaggtggtctcataattccatttgtggagagaacaggagggccagatagataggtcctagcagaaggcattgaggtgagggatcattttgggtcagacatcaatgtcnctgtcccccctgggtccagccaagctgtgccccatcccccaagcctcctgggaggatccagccaaatcttgcgactcctggcacacacctgtctgtaacctgttttgtgctctgaaagc

SEQ ID NO: 161 - DNA, 544 bp, Homo sapiens
aagatagcccaacctagctcagatccaccaagataagcacagcaaaagcttggctgcatttttgaggaataaaaacctgcagaaagcaccgataaccttcaagatctgaatgagattctattataacccgtctaaacgattgcaaaattcctcctttggttttggaagcagcgtttgctctcccgtggctcggattctctgaggaccagggagttgacacacaaaccccgccatgggtccgagccagctatttctcaaggctcccacctcgccaagctcccaagggcctgctggcagtgcctacgctgtgccaactaccctgtctggtacagaccacggctgggtaagcacccttaaaagcaacagaaatgacgtctggaagctgaaatgtgaaactgtcaagatggcttaggagaggaaggagtggacccgctggtctttggcattttgtatttagaattattctaactttatacataatgtataggccgatcttttggaagggataaggttttcattcttgtgcaactcattattctcatta

SEQ ID NO: 162 - DNA, 412 bp, Homo sapiens
atggagatggtactggagtcgccagtatttaccgggggccatttgcagatgaaaattttaaacttagacactcagctccaggcctgctttccatggcgaacagtggtccaagtacaaatggctgtcagttctttatcacctgctctaagtgcgattggctggatgggaagcatgtggtgtttggaaaaatcatcgatggacttctagtgatgagaaagattgagaatgttcccacaggccccaacaataagcccaagctacctgtggtgatctcgcagtgtggggagatgtagtccagacaaagactgaatcaggccttcccttcttcttggtggtgttcttgagtaagataatctggactggcccccgtctttgcttccctgcctgctgctgccccatttgatcaagagac

SEQ ID NO: 163 - DNA, 569 bp, Homo sapiens
tgaggaacccaatgaatgtgacttcaagaatatggatagtttaccttctggtaaaatacatcgaaaagtgaaaataatattaggacgaaatagaaaagaaaatctggaaccaaatgctgaatttgataaaagaactgaatttattacacaagaagaaaacagaatttgtagttcaccggtacagtctttactagacttgtttcagactagtgaagagaaatcagaatttttgggtttcacaagctacacagaaaagagtggtatatgcaatgttttagatatttgggaagaggaaaattcagataatctgttaacagcgtttttctcgtccccttcaacttctacatttactggcttttagaatttaaaaaatgcatacttttcagaagtgataaggatcatattcttgaaatttttataaatatgtatggaaattcttaggatttttttaccagctttgtttacagacccaaatgtaaatattaaaaataaatatttgcaattttctacagaattgaatacctgttaaagaaaaattacagaataaacttgtgactggtcttgtttta

SEQ ID NO: 164 - DNA, 375 bp, Homo sapiens
ccgtccgctgttactcagctgaggtggtcacactgtggtaccgcccaccggatgtcctctttggggccaagctgtactccacgtccatcgacatgtggtcagccggctgcatctttgcagagctggccaatgctgggcggcctctttttcccggcaatgatgtcgatgaccagttgaagaggatcttccgactgctggggacgcccaccgaggagcagtggccctctatgaccaagctgccagactataagccctatccgatgtacccggccacaacatccctggtgaacgtcgtgcccaaactcaatgccacagggagggatctgctgcagaaccttctgaagtgtaaccctgtccagcgtatctcagcagaag

SEQ ID NO: 165 - DNA, 549 bp, Homo sapiens
gttttgcctcacctaataggctgggagactgaagactcagcccgggtggctgcagaaaaatgattggccccagtccccttgtttgtcccttctacaggcatgaggaatctgggaggccctgagacagggattgtgcttcattccaatctattgcttcaccatggccttatgaggcaggtgagagatgtttgaatttttctcttccttttagtattcttagttgttcagttgccaaggatccctgatcccattttcctctgacgtccacctcctaccccataggagttagaagttagggtttaggcatcattttgagaatgctgacactttttcagggctgtgattgagtgagggcatgggtaaaaatatttctttaaaagaaggatgaacaattatatttatatttcaggttatatccaatagtagagttggctttttttttttttttttggtcatagtgggtggatttgttgccatgtgcaccttggggttttgtaatgacagtgctaaaaaaaaagcattttttttttatgatttgtctctgtcacc

SEQ ID NO: 166 - DNA, 230 bp, Homo sapiens
cctcccatcagctctacatctgagggacatggtgtgccacaggctgcaagctgcagggaattttcattggatgcagttgtatagttttacactctagtgccatatatttttaagacttttctttccttaaaaaataaagtacgtgtttacttggtgaggaggaggcagaaccagctctttggtgccagctgtttcatcaccagactttggctcccgctttggggagcgcc

SEQ ID NO: 167 - DNA, 329 bp, Homo sapiens
atccccttagtgctctgaaatatttacaaaatgatctttatataactgtggatcattcagacccagaagagacaaaagagtttcagctcctggcatcagctctattcaaatctggttcagattttacagctctgggcttttctgatgtggatcacacctatgctcaaagaactcagctctttgacaccttagtaaatttctttcctgacagcatgactcctcctaaaggcaacctcgtagacctgatcacactgtaactgaagagtcactggacacagaaatggaaaacaggagtcgattttccgtcttttggattgcagctccactga

SEQ ID NO: 168 - DNA, 437 bp, Homo sapiens
tccatctgccccaggacaagagcaagaaggacatcagttgcccagtcatgtgatcccctgccatcttgccttaggaacagccttcccccaccagcagccatggctggctggggcgttagccaagccacctactgccaggaattggagcctcagttccctcctgtgtcaagtagctaactgcagcagctggactgagggcagagtctgtgggtgcagagaccctgcatgtaggtcacaggttgaggcccagccactctccctggggcctggtgggtaggcaagtagctctggggccacctcaagtgaccaaatgctattaatttccatcctttagcaggctgggccctaggcaggaagctggcttctgggagaggagtgagaacgtgcagggcctgcctagcttgcgtgcttgaggaaggtggcattccgtgcttgcc

SEQ ID NO: 169 - DNA, 554 bp, Homo sapiens
  misc_feature (52)..(52): n is a, c, g, or t
  misc_feature (59)..(59): n is a, c, g, or t
  misc_feature (252)..(252): n is a, c, g, or t
  misc_feature (513)..(513): n is a, c, g, or t
gccttctgggaacctatggagaaagggaatccaaggaagcagccaaggctgntcgcagnttccctgagctgcacctcttgctaaccccaccatcacactgccaccctgccctagggtctcactagtaccaagtgggtcagcacagggctgaggatggggctcctatccaccctggccagcacccagcttagtgctgggactagcccagaaacttgaatgggaccctgagagagccaggggtcccctgaggcncccctaggggctttctgtctgccccagggtgctccatggatctccctgtggcagcaggcatggagagtcagggctgccttcatggcagtaggctctaagtgggtgactggccacaggccgagaaaagggtacagcctctaggtggggttcccaaagacgccttcaggctggactgagctgctctcccacagggtttctgtgcagctggattttctctgttgcatacatgcctggcatctgtctccccttgttcctgagtgnccccacatggggctctgagcaggctgtatctggattctggc

SEQ ID NO: 170 - DNA, 309 bp, Homo sapiens
ctcggaattccctgaagcaacactgccagaagtgtgttttggtatgcactggttccttaagtggctgtgattaattattgaaagtggggtgttgaagaccccaactactattgtagagtggtctatttctcccttcaatcctgtcaatgtttgctttatgtattttggggaactgttgtttgatgtgtatgtgtttataattgttatacatttttaattgagccttttattaacatatattgttatttttgtctcgaaataattttttagttaaaatctattttgtctgatattggtgtgaatgctgta

SEQ ID NO: 171 - DNA, 302 bp, Homo sapiens
cctccctatcgtctgaacagttgtcttcctcagcctcctcccgcccccaccttgggaatgtaaatacaccgtgactttgaaagtttgtacccctgtccttccctttacgccactagtgtgtaggcagatgtctgagtccctaggtggtttctaggattgatagcaattagctttgatgaacccatcccaggaaaaataaaaacagacaaaaaaaaaggaaagattggttctcccagcactgctcagcagccacagcctccctgtatgcctgtgcttggtctactgataagccctctacaaaa

SEQ ID NO: 172 - DNA, 491 bp, Homo sapiens
tgctctgccccagcttgggcagatctcccacatgccaggggcctttgggtgctgttttgccagcccatttgggcagagaggctgtggtttgggggagaagaagtaggggtggcccgaaagggtctccgaaatgctgtctttcttgctccctgactgggggcagacatggtggggtctcctcaggaccagggttggcaccttccccctcccccagccactccccagccagcctggctgggactgggaacagaactcggtgtccccaccatctgctgtcttttctttgccatctctgctccaaccgggatgggagccgggcaaactggccgcgggggcaggggaggccatctggagagcccagagtccccccactcccagcatcgcactctggcagcaccgcctcttcccgccgcccagcccaccccatggccggctttcaggagctccatacacacgctgccttcggtacccaccacacaacatccaagtgg

SEQ ID NO: 173 - DNA, 122 bp, Homo sapiens
ccggggctggttttctatgaacgattccggcctgggatgcgggccaggctgcaggcggcatagttgggcccattcgtcctggaaagggactggggggtcccaacttagccctgggtgggccg

SEQ ID NO: 174 - DNA, 536 bp, Homo sapiens
attccgatcccaatgagcaagtgacaagaaaaaacatgctcctggctacaaaacagatatgcaaagagttcaccgacctgctggctcaggaccgatctcccctggggaactcacggcccaaccccatcctggagcccggcatccagagctgcttgacccacttcaacctcatctcccacggcttcggcagccccgcggtgtgtgccgcggtcacggccctgcagaactatctcaccgaggccctcaaggccatggacaaaatgtacctcagcaacaaccccaacagccacacggacaacaacgccaaaagcagtgacaaagaggagaagcacagaaagtgaggctctcctcccgccccgcccctcccacgcctcaccagccccccgcgcgcccaccctccggcgggtgacagctccgggatcagcaacccttcctgctgctgctactgctgctgctgctgccgccgccgccgccgccgctgcccttgggtccccccgagtctccgggactgccctctcgactgtcagtggggcagc

SEQ ID NO: 175 - DNA, 487 bp, Homo sapiens
gatgatttctcgaaagccatgccagaagcagtcttccaggtcatcttgtagaactccagctttgttgaaaatcacggacctcagctacatcatacactgacccagagcaaagctttccctatggttcaaagacaactagtattcaacaaaccttgtatagtgtatgttttgccatatttaatattaatagcagaggaagactccttttttcatcactgtatgaattttttataatgtttttttaaaatatatttcatgtatacttataaactaattcacacaagtgtttgtcttagatgattaaggaagactatatctagatcatgtctgattttttattgtgacttctccagccctggtctgaatttcttaaggttttataaacaaatgctgctatttattagctgcaagaatgcactttagaactatttgacaattcagactttcaaaataaagatgtaaatgactggccaataataaccatttt

SEQ ID NO: 176 - DNA, 504 bp, Homo sapiens
ccggctatgggctcgagccgagttccttcaacatgcactgcgcgccctttgagcagaacctctccggggtgtgtcccggcgactccgccaaggcggcgggcgccaaggagcagagggactcggacttggcggccgagagtaacttccggatctacccctggatgcgaagctcaggaactgaccgcaaacgaggccgccagacctacacccgctaccagaccctggagctggagaaagaatttcactacaatcgctacctgacgcggcggcggcgcatcgagatcgcgcacacgctctgcctcacggaaagacagatcaagatttggtttcagaaccggcgcatgaagtggaaaaaggagaacaagaccgcgggcccggggaccaccggccaagacagggctgaagcagaggaggaagaggaagagtgagggatggagaaagggcagaggaagagacatgagaaagggagaggaagagaagcccagctctgggaactgaatcagg

SEQ ID NO: 177 - DNA, 356 bp, Homo sapiens
gaatcaggaaactcaaatcgaatagggaagtaaaaaaacaaaacaaaaaacaaaaaaaaacaaaaaaaaaccctatttaaatgaaaggagtttaaaaacattttttaaggagggagaaaggagaaattttggtttttcaacactgaaaaaatagtacctataggaaagtctgtcaggtttggtttttttgtacaatatgaaaaggacattatctacctgttctgtagctttctggaatttacctccccttttctatgttgctattgtaaggtctttgtaaaatcttgcagttttgtaagccctctttaatgctgtctttgtggactgtgggtctggactaaccctgtggttgcctg

SEQ ID NO: 178 - DNA, 225 bp, Homo sapiens
ccgagctgaagaaccagcggctcaaggaggttttccagaccaagatccaggagttccgcaaggcctgctacacgctcaccggctaccagatcgacatcaccacggagaaccagtaccggctgacctcgctgtacgccgagcacccaggcgactgctcatcttcaaggccaccagcccctcgggttccaagatgcagctactggagacagagttctcacacaccgt

SEQ ID NO: 179 - DNA, 380 bp, Homo sapiens
tactgcttgcagtaattcaactggaaattaaaaaaaaaaaactagactccattgtgccttactaaatatgggaatgtctaacttaaatagctttgagatttcagctatgctagaggcttttattagaaagccatatttttttctgtaaaagttactaatatatctgtaacactattacagtattgctatttatattcattcagatataagatttgtacatattatcatcctataaagaaacggtatgacttaattttagaaagaaaattatattctgtttattatgacaaatgaaagagaaaatatatatttttaatggaaagtttgtagcatttttctaataggtactgccatatttttctgtgtggagtatttttata

SEQ ID NO: 180 - DNA, 440 bp, Homo sapiens
tgcctgctggggattactcgatcaaaaccttccttccctggctacttcccttcctcccggggccttccttttaggtgctggagctggaggggtggggagctagaggccacctatgccagtgctcaaggttactgggagtgtgggctgcccttgttgcctgcacccttccctcttccctctccctctctctgggaccactgggtacaagagatgggatgctccgacagcgtctccaattatgaaactaatcttaaccctgtgctgtcagataccctggttttctggagtcacagtcagtgaggaggatgtggtaagaggaggcagagggcaggggtgctgtggacatgtgggtggagaagggagggtggccagcactagtaaaggaggaatagtgcttgctggccacaaggaaaaggaggaggtgtctggggtgagggagt

SEQ ID NO: 181 - DNA, 518 bp, Homo sapiens
  misc_feature (41)..(41): n is a, c, g, or t
gcttttacggtgatattgtgcatgcaaaccaggagcatttngtgtcttaagaaaaataatcttagaacagatggctgtgaaaattacacccatgcacagaacaagccacaggaataatagttcaggatttggtttttctctttttcttgtaaacctggagggttgatatattctttccatgcagttattagaacttagttttgttccaacagttaaacttgcaatgaaaagaaaatgtgccatttttttcactcagaattattcatagctgtatatttgaaactgctaattacacacgtgtgatgtatgttggttttttagtgcaatttcttctgtagctattctttgaccaaactgtgggtattgttaatattaatttatatttgtctcattttgtatgtatgtgtagtgtgtttgtgagtatgtgtggtttataatctgacaaagtcatgaagctcagtttggctgtaatttaattccccttcccttatttttatttatttttgtactgtgctgat

SEQ ID NO: 182 - DNA, 538 bp, Homo sapiens
caggtatgttgcctttatggtttcccccttctacatttcttagactacatttagagaactgtggccgttatctggaagtaaccatttgcactggagttctatgctctcgcacctttccaaagttaacagattttggggttgtgttgtcacccaagagattgttgtttgccatactttgtctgaaaaattcctttgtgtttctattgacttcaatgatagtaagaaaagtggttgttagttatagatgtctaggtacttcaggggcacttcattgagagttttgtcttgccatactttgtctgaaaaattcctttgtgtttctattgacttcaatgatagtaagaaaagtggttgttagttatagatgtctaggtacttcaggggcacttcattgagagttttgtcaatgtcttttgaatattcccaagcccatgagtccttgaaaatattttttatatatacagtaactttatgtgtaaatacataagcggcgtaagtttaaaggatgttggtgttccacgtgttttattcctgtatg

SEQ ID NO: 183 - DNA, 498 bp, Homo sapiens
tcagtctctcaaagaccccatggtccatcccctgagggtggtcagccaaggctcccgttccgtgggatgccataaaagccgcccagtgggacccacagtcacacagagcgcctcacctgcatcctctcccccacaagagccccaaagatcccacgggagaggggagagggacgcacagcactgcctgccaagcgagaatgcaggccccgccccctcggcccctcaccacctctttctacagcctaatttattggattccctattcgtagccatctccgtggccaatgtgactaccgtgccagcagcgggggcggcccagcctctgagtcccgtggggccccggctcccaccggtgccaaacccagcccctgcggccgtcaccccgccagcctacactgccagccgccaccggggcacacgggcctctgcttgccagccaggagtgcggacaccatgttcccagctcagtgccaaagaggggtcaccagggggagctgt

SEQ ID NO: 184 - DNA, 421 bp, Homo sapiens
cttactgtgttttcagtcacttcctttctgtgaaaggttgcttagctttttttttgacatttgttgttctttatataaaaataacagattggatagatgtgtacatttggtgtttgaaattctctgaaaatcccattaggaaaccaggtgtgaaaagggctcagtagcttctctgagtggcgtttttagctgactggaagtgcttaatctggatcgtcttttttttttttttttttttcaatattttaaaaggagaatttaaatactgtgcttactgtgaaatatatcagttggtgagccgggcgtggtgggtcacgcctgtaatcccagcactttgggaggccaaggcgggtggatcacccgaggtcaggagttcaagaccagcctggccaacgtggtgaaagcctgtatctattaaaag

SEQ ID NO: 185 - DNA, 498 bp, Homo sapiens
gtcctttgcaacattctcataaaattgggcacagagttcgcattggcgcaatatttatgggagtgggagggatggggaaaataaacttaactctacaaaagcaaactctaatgcatgcaagaatcattaggttggcaggtatatgcataagtgaaaaatctggaagtgtaatggtagaacataaaacttgtattgcttctgtttcagtgcaaaaatgtactagccaatacgcttaagtgtgtggcccatgaattgaacaatttaaccttgaagtctatatccgtgatattatgtcgatttttaactgaggggaaattaactagtccagcctaaaatgcttcttttaatctgcattctgtttcctcttctagttgtgccattactagtgatcatgtttttttcccccctttaatgaaaacaataaacatctatttgagacaattaaaatccttctgggggcactggaagcacaatacggtgaccaatcttgctttcatt

SEQ ID NO: 186 - DNA, 426 bp, Homo sapiens
gatgcctcctgattatatttcacattttcaggaacaaaatgatttaaaagcattgctagaaaatctccttcaaaatatccaatccaaaaaaagaaagaatgtagaaattatgtggctggctgcaacgatttgccgcaaactgaatggtattcgtttcacctgttgtaaaagtgccaaagacaggacatcgatgtcagtgacacttgaacaatgctcaatcttgagagatgagcaccagttacacaaggacttctttatccgagcgctggattgcatgagaagagaaggatgccgcatagagaatgtactgaagaatatcaaatgcagaaagtatgctttcaacatgctacagctgatggctttccccaagtactacagacctccagaggggacttatggaaaagctgacacctaagtttaccaaca

SEQ ID NO: 187 - DNA, 419 bp, Homo sapiens
tgaaaggcaggacctggtcaccccagcaagtgctatggacagttcccggaaacggttgcccacttcacaggtccatgggtctgacccttggactctgccaggatcaactgcccagagtgccagagttttagccaaaggtgtacttacttccttatttatctccaaaaggatggaaactgtgggagtcaaagcctattttgctgagtgttcccactggatcctctgtagaattagcaggtcatgctgtcaaaatcatggacaaaggctgggtgcagtggctcatgcctataatcccagcactttgggaggccaaggtgggcggatcacctgagctcaggagtttaagaccagcctgggcaacatggggaaactccatctctacaaaatatacaaaatattagccagccatcgtggtgcgt

SEQ ID NO: 188 - DNA, 481 bp, Homo sapiens
gccgtcacccgaagtcagaaacgtggcatctcatcggaagaggaggaaggagaggtagacagtgaagtagagctgacatcaagccagaggtggcctcagagcctgaacatgcgccagtcactatctaccttcagctcagagaatccatcagatggggaggaaggcacagctagtgaaccttcccccagtggcacacctgaagttggcagcaccaacactgatgagcggccagatgagcggtctgatgacatgtgctcccagggctcagaaatcccactggacccacctccttcagaggtcatccctggccctgaacccagctccctgcccattccacaccaggaacttctcagagagcggggccctcccaattctgaggactcagactgtgacagcactgaattggacaactccaacagcgttgatgccttgcggcccccagcttccctccctccatgaaagccactcgtattccttgtac

SEQ ID NO: 189 - DNA, 424 bp, Homo sapiens
acttctcaccagcagtcgtggggaacggaggaggacatggggaggttgtggggcctcaggctccgggcaccaggggccaacctcaggctcctaaagagacattttccgcccactcctgggacactccgtctgctccaatgactgagcagcatccaccccaccccatctttgctgccagctctcaggaccgtgccctcgtcagctgggatgtgaagtctctgggtggaagtgtgtgccaagagctactcccacagcagccccaggagaaggggctttgtgaccagaaagcttcatccacagccttgcagcggctcctgcaaaaggaggtgaaatccctgcctcaggccaagggaccaggtttgcaggagcccccctagtggtatggggctgagccctcctgagggccggttctaaggctcagact

SEQ ID NO: 190 - DNA, 515 bp, Homo sapiens
aatgcagctgacgatccgttggtgcatgaaagtcttctaaccattccaaaatctctttcagagaaacgagagaacgtcatgtttgtgctgcctctgcatgggggccacttgggcttctttgagggctctgtgctgttccccgagcccctgacatggatggataagctggtggtggagtacgccaacgccatttgccaatgggagcgtaacaagttgcagtgctctgacacggagcaggtggaggccgacctggagtgaggcctccggactctggcacgctccagcagccctcctctggaagctgcgtcccctcaccccctgtttcaggtctcccatctccctcagtgacctggatctgacctcacaccatcagcagggggcacccaccatgcacacctgtctcggagtaggcagctcttcctgggagctccaggctatttttgtgcttagttactggttttctccattgcattgttaggcatggtgacaagtgacagagttcttgccctctgtcc

SEQ ID NO: 191 - DNA, 434 bp, Homo sapiens
caggtgtatctgcacagtggtcgccccacagcagaccatgtgttcacgggatgcccgcacaaaacagctgaggcagctactggagaaggtgcagaacatgtctcaatccatagaggtcttggacaggcggacccagagagacttgcagtacgtggagaagatggagaaccaaatgaaaggactggagtccaagttcaaacaggtggaggagagtcataagcaacacctggccaggcagtttaagggctaacttaaaagagttttttcaatgctgcagtgactgaagaagcagtccactcccatgtaaccatgaaagagagccagagagctttttgcaccatgcatttttactattattttccaatacttagcaccatttcactaaggaaccttgaatacaaccaggatcctcctttgcatgcgactgtagctgc

SEQ ID NO: 192 - DNA, 403 bp, Homo sapiens
aaaatgttgcgttctcagtccaaaaagaagtggaaaagaatctgaagtcatgcttggacaatgttaatgttgtgtccgtagacactgccagaacactattcaaccaagtgatggaaaaggagtttgaagacggcatcattaactggggaagaattgtaaccatatttgcatttgaaggtattctcatcaagaaacttctacgacagcaaattgccccggatgtggatacctataaggagatttcatattttgttgcggagttcataatgaataacacaggagaatggataaggcaaaacggaggctgggaaaatggctttgtaaagaagtttgaacctaaatctggctggatgacttttctagaagttacaggaaagatctgtgaaatgctatctctcctgaa

SEQ ID NO: 193 - DNA, 355 bp, Homo sapiens
ggctgggagttgattgagccaacactggatcaattagatcaaaagatgagagaagctgaaacagaaccgcatgagggaaagaggaaagtggaatctctgtggcccatcttcaggatccaccaccagaaaacccgctacatcttcgacctcttttacaagcggaaagcctacagcagagaactcttagatatatgttataaagaaggcttagcagacaaaaacctgttggcaaaatggaaaaagcaaggtataggaaacttgtgctgcctgcggtgcattcagacacgggacaccaacttcgggacgaactgcatctgccgcgtgcccaaaagcaagctggaagtgggccgcatca

SEQ ID NO: 194 - DNA, 527 bp, Homo sapiens
gggtggttctggccaggaaggcacaaggtagctgtgggccaagacaccagccctgtcctagcccttcagtaagaccttgccaggagaggagaaggatgcctgggtgccaggcaagacaagcccctcagcaggagagaggcccagaggctccagctggccaccgtgccccacaagatggcccctgtgtggttccctttaccttggcttcctggcccagtccctgcctctccacctgcaccctgcttcctggcccagtcccaggttggagtccctctgcatagctgactactcatgcattgctcaaagctggcttttcacattaagtcaacaccaaacgtggttgccacatttcatcagacagacacctccctctggagatgcagttgagtgacaaccttgttacattgtagcctagaccaattctgtgtggatatttaagtgaacatgtttacaatttttgtatatatcactctctccctctcctgaaagaccagagattgtgtattttcagtgtcccatgttccgac

SEQ ID NO: 195 - DNA, 531 bp, Homo sapiens
aacagaaagtctcagcccaggatggggcttcttcaacaggcccctgccctcctgaagcctcagtccttcaccttgccaggtgccgtttctcttccgtgaaggccactgcccaggtccccagtgcgccccctagtggccatagcctggttaaagttccccagtgcctccttgtgatagaccttcttctcccacccccttctgcccctgggtccccggccatccagcggggctgccagagaaccccagacctgcccttacagtagtgtagcgccccctccctctttcggctggtgtagaatagccagtagtgtagtgcggtgtgcttttacgtgatggcgggtgggcagcgggcggcggcgtccgcgcagccgtctgtccttgatctgcccgcggcggcccgtgttgtgttttgtgctgtgtccagcgctaaggcgaccccctcccccgtactgacttctcctataagcgcttctcttcgcatagtcacgtagctcccaccccaccctcttcctgtgtctcacgcaagtttta

SEQ ID NO: 196 - DNA, 441 bp, Homo sapiens
cttggcctgctaaggtcttggaacttgcctgcctttccatccatggccagcagcacctgccctacctgccccacttgtccttagcctggacctctgacagcagcatctctaccttctccccagctcccaggaccacaggctcaggcagggcctccatgggccccaggggaacactggggacttggcctctctctagggtacatggtgctgggagaggcagcccaggaagtctcatctggggagcaggcagccagcatctgggccttggcctggagcacaaagaccctggctttcattttctctcaggtgaaaggaaattaaggcaacaaaagaagcccggctcctggtcacctaggaagcctcagattccttcccatggagggagggagtggtttgcaggtggccaagttcctctaacttggctcacactcgacatgaaaa

SEQ ID NO: 197 - DNA, 552 bp, Homo sapiens
gcagtccctattagctaaaagcccattaagacaagaaacacaggaagcccctggtcccagagaagaagcaaagggccaggtagaggccagaagggagtctttggatcctgtccaggagcctgggggccaggcagaggctgatggagatgttccagggcccagaggggaagctgagggccaggcagaggctaaaggagatgcccctgggcccagaggggaagctgagggccaggcagaggctaaaggagatgcccctgggcccagaggggaagctgggggccaggcagaggccagggagaatggagaggaggccaaggaacttccaggggaaacactggagtctaagaacacccaaaatgactttgaggtgcacattgttcaagtggagaatgatgagatctagatcttaagatacaggtacccacagaagtctcagtgccagaacataagccctgaagtgggcaggggaaatgtacgctgggacaaggaccatctctgtgccccctgtctggtcccagtaggtatcaggtctttctatgcagctcagggaga

SEQ ID NO: 198 - DNA, 467 bp, Homo sapiens
agcagggagggcttctgccatttctgagatcaaaacggttttactgcagctttgtttgttgtcagctgaacctgggtaactagggaagataatattaaggaagacaatgtgaaaagaaaaatgagcctggcaagaatgcgtttaaacttggtttttaaaaaactgctgactgttttctcttgagagggtggaatatccaatattcgctgtgtcagcatagaagtaacttacttaggtgtgggggaagcaccataactttgtttagcccaaaaccaagtcaagtgaaaaaggaggaagagaaaaaatattttcctgccaggcatggaggcccacgcacttcgggaggtcgaggcaggaggatcacttgagtccagaagtttgagatcagcctgggcaatgtgataaaaccccatctctacaaaaagcataaaaattagccaagtgtggtagagtgtgcctgaagtccc

SEQ ID NO: 199 - DNA, 562 bp, Homo sapiens
tcactcaacagcactgtgatgtattattttcaatgaggtgcctttcttaactgaccaaatgctgccttgtttggcccctaaatcaataaaatatgttaaaatttgtatcccctgttgtggcattttttttagataatctaagctagaaaaatgacattgaattctggacctggctggaaggaaaagaagccctttcttgtcgctggcagctgtgtggtaggaggtccaagtatgtgcatatgagataagcctgcaacctcttgaccttcagctcctatgcaggcttctcttgagcccagagacaaggcagcttggtctagtggagatagcactgtgcttggagttcaggggacctaggacaaatcccagccagttagttattcactgtgctcctgtttcctcagctgaaaaaggaagttggttatgccaccttcttggccttaatggcattaaatgaaatttataggaagaaggtttttgctcagtacctggcatgcaacagacattggataaatgttagttggatccagatatacacagaaagatatctgcttcctgccag

SEQ ID NO: 200 - DNA, 432 bp, Homo sapiens
  misc_feature (34)..(34): n is a, c, g, or t
  misc_feature (46)..(46): n is a, c, g, or t
  misc_feature (104)..(104): n is a, c, g, or t
  misc_feature (108)..(108): n is a, c, g, or t
  misc_feature (274)..(274): n is a, c, g, or t
ctttcccagagacccggggatggattggcctccngggcgcaggggngggtgcggcagggcaggagcttggcagagagatagccgggctccagggagtggggagnaganagggggagacccctttgccttcccccctcagcaaggggctgcttctggggctccctgcctggatccagctctgggagccctgccgaggtgtggctgtgaggtcagggttttagagagcagtggcagaggtagccccctaaatgggcaagcaaggagccccccaaanacactaccactccccatccccgtctgaccaagggctgacttctccaggacctagtcggggggtggctgccagggggcaaggagaaagcaccgacaatctttgattactgaaagtatttaaatgtttgccaaaaacaacagccaaaacaaccaaactat

SEQ ID NO: 201 - DNA, 353 bp, Homo sapiens
cgccgctgcgaattctcggacaaaactgtcaacagcccgggcgcgccttttggctctgcgggtccctctatttatgcaaagccgacctatgctacagccccccaacccccgacctggggtagggaggaagagggtgccggggaagggagtccgccctgtccaggcactagaggctcccttgacgtttggcagatgaaaaacaactaagcctttttgaggtgtagagattctcaggtccaggcgttaaaaaataatggtcaaaagaataatacaaaaatagtaaaggtcttgaagaatgccagcgaagcaattcttttttatttgaggacacttgtctggtgtactttttcatg

SEQ ID NO: 202 - DNA, 546 bp, Homo sapiens
atcaatcagctttgctcacaaactaaaggaagttttgtgaatggggtgtttgaggtacataagaaaaatgtaaggggtgaattcacttattatgaaatacaagataatacagggaagatggaagtggtggtgcatggacgactgaacacaatcaactgtgaggaaggagataaactgaaactcaccagctttgaattggcaccgaaaagtgggaataccggggagttgagatctgtaattcatagtcacatcaaggtcatcaagaccaggaaaaacaagaaagacatactcaatcctgattcaagtatggaaacttcaccagactttttcttctaaaatctggatgtcattgacgataatgtttatggagataaggtctaagtccctaaaaaaatgtacatatacctggttgaaatacaacactatacatacacaccaccatatatactagctgttaatcctatggaatgggggtattgggagtgcttttttaatttttcatagtttttttttaataaaatggcatattttgcatctacaacttct

SEQ ID NO: 203 - DNA, 246 bp, Homo sapiens
ggcttcctggccaactactgccagggtcagtgcgcgctgcccgtcgcgctgtcggggtccggggggccgccggcgctcaaccacgctgtgctgcgcgcgctcatgcacgcggccgccccgggagccgccgacctgccctgctgcgtgcccgcgcgcctgtcgcccatctccgtgctcttctttgacaacagcgacaacgtggtgctgcggcagtatgaggacatggtggtggacgagtgcggctgc

SEQ ID NO: 204 - DNA, 470 bp, Homo sapiens
ggagctgctgggacaggggattgattatgagaagatcctgaagctcacggctgacgccaagtttgagtcaggcgatgtgaaggccacagtggcagtgctgagtttcatcctctccagtgcggccaagcacagtgtcgatggcgaatccttgtccagtgaactgcagcagctggggctgcccaaagagcacgcggccagcctgtgccgctgttatgaggagaagcaaagccccttgcagaagcacttgcgggtctgcagcctacgcaaactgaagcaggcccagaccctgatgagctccctgggctgaggagaagggtgttccaggcctgtgtggagccgccctgcccgtatggagtcacgccctctgaactgctcttcgggaggcagccctggttctaggatgctgaggccctggcccggactctggcctcccagatccccagctgcctcacttctctcttgagaacttg

SEQ ID NO: 205 - DNA, 469 bp, Homo sapiens
gaactgcctggttggagcgaatctgctagtgaagattggggacttcggcatgtccagagatgtctacagcacggattattacagggtgggaggacacaccatgctccccattcgctggatgcctcctgaaagcatcatgtaccggaagttcactacagagagtgatgtatggagcttcggggtgatcctctgggagatcttcacctatggaaagcagccatggttccaactctcaaacacggaggtcattgagtgcattacccaaggtcgtgttttggagcggccccgagtctgccccaaagaggtgtacgatgtcatgctggggtgctggcagagggaaccacagcagcggttgaacatcaaggagatctacaaaatcctccatgctttggggaaggccaccccaatctacctggacattcttggctagtggtggctggtggtcatgaattcatactctgttgcctcc

SEQ ID NO: 206 - DNA, 512 bp, Homo sapiens
aggaggcaaggttggctcggagctccccggagcagcccaggcccagcacctccaaggcagtctcaccaccccacctggatggaccgcctagccccaggagccccgtcataggaagtgaggtcttcctgcccaacagcaaccacgtggccagtggcgccggggaggcagaggaacgcgttgtggtgatcagcagctcggaagactcagatgccgaaaactcgtcctcccgagagctggatgacagcagcagtgagtccagtgacctccagctggaaggccccagcaccctcagggtcctggacgagaaccttgctgacccccaagcagaagacagacctctggttttctttgacctcaagattgacaatgaaagtgggttctcctggggctacccccacccctttctaatttagtctctgagtcccaaaaagaagtgcaggcagagcatctgccaggcccaggagagctctgagctctggccaacaactgcagccaggctgggcagagcactc

SEQ ID NO: 207 - DNA, 488 bp, Homo sapiens
gagggtggcaaggaacttcctggctgcctggggagacagcagaacccaggccacacgctggaagccggctggtttctgctccgtcattgcattcggaaaggcgaccccgaacttcgagcccacgtgattgacaagttcctattgttgcccttccactccggatgggaccctgaccacggaggcctcttttacttccaggatgctgataacttctgccccacccagctggagtgggccatgaagctctggtggccacacagtgaagccatgattgccttcctcatgggttacagtgacagtggggaccctgtgctgctgcgcctcttctaccaagtggctgagtacaccttccgccagtttcgcgatcccgagtacggggaatggtttggctacctgagccgagagggcaaggtggccctctccatcaagggaggtcctttcaaaggctgcttccacgtgccgcggtgcctagccatgtgcgaggagat

SEQ ID NO: 208 - DNA, 459 bp, Homo sapiens
ttcagacccagactcttttcaagactacattaagtcctatttggaacaagcgagtcggatctggtcatggctccttggggcggcgatggtaggggccgtcctcactgccctgctggcagggcttgtgagcttgctgtgtcgtcacaagagaaagcagcttcctgaagaaaagcagccactcctcatggagaaagaggattaccacagcttgtatcagagccatttataaaaggcttaggcaatagagtagggccaaaaagcctgacctcactctaactcaaagtaatgtccaggttcccagagaatatctgctggtatttttctgtaaagaccatttgcaaaattgtaacctaatacaaagtgtagccttcttccaactcaggtagaacacacctgtctttgtcttgctgttttcactcagcccttttaacattttcccctaagcccatatgtctaagg

SEQ ID NO: 209 - DNA, 533 bp, Homo sapiens
gggaggggcttggctaggtagttctgtgtggcggtggtcattcccctcattaaacaccagttcttggtgacgccaggggctggtaggtcattcaaagctgtggccagctcacgcctgcttcctccctccctgccctgctgaatcctaaagctgtgcctatatctgtgatttgaatgagggagccctttggggcaaattcaggtgcccccattgcctcaggctggccctggtcccaggtggcagcggttgaggaggggtacagggctctcaagcctgaggttttcttctctgggcttaattttctcttggggtacgtgcctgacagtgtttaaggtgtccgttgaactggagttgcagacttttaaatagatgaccccttcagatcatctgtgcctacctcctgcccatcaggcgtctacactgtcactcagacacctgtggcatgtggaggagactgccctgtcctgagcctggaaaatgtgaaactgtctcctgcaacctgctgggcatgtgggcctggctgtgttcaattg

SEQ ID NO: 210 - DNA, 438 bp, Homo sapiens
gcttccgggaaggtgtctcaagtgggtgggcagacttctgacgaagccctgagcatgctgtctgaaggttctgatgccagcacaattgaaattcacactgcaagtgaatcctgcaacaaaaatgagggtgaccctgctctcccaacccatggagacctatgaaggggatgtgctgggggtccagaccccatattcctcagactcaacaattcttgttctttagaactgtgttctcaccttcccaacactgcactgccgaagtgtagcggcccccaaaccttgctctcatcaccagctagagcttcttcccgaagggcctttaggataggagaaagggttcatgcacacacgtgtgagaatggaagagccccctccagaccactctacagctgctctagccttagttgccactaggaagttttctgaggctggctgtaa

SEQ ID NO: 211 - DNA, 135 bp, Homo sapiens
cctgaggcccatcaaagtggacagccaagagcacaagatcatcctctatgaaaaccccaacttcaccgggaagaagatggaaatcatagatgacgatgtacccagcttccacgcccatggctaccaggagaaggt

SEQ ID NO: 212 - DNA, 440 bp, Homo sapiens
tcaaggcgctaggcgacgagctgcaccagcgcaccatgtggcggcgccgcgcgcggagccggagggcgccggcgcccggcgcgctccccacctactggccttggctgtgcgcggccgcgcaggtggcggcgctggcggcctggctgctcggcaggcggaacttgtaggaacgcggggcttcttggtggggccggagccgagacccagccggagcgagcaacaggttggtgaaaaccctgtgtccttggagaaagctggttcccgttttccagagggggagcccagagcttgaaaggccgcggttggcacttcgagaaggaagtggagagtaaagacagcgcctggagcgatcgtagaaacacagaatgggactggggaagccctttggaaatccagctgcagaaacagacaccccaatgctatttacatacagctctata

SEQ ID NO: 213 - DNA, 489 bp, Homo sapiens
aagtctgtagtctttatgatcctaaaagggaaaattgccttggtaactttcagattcctgtggaattgtgaattcatactaagctttctgtgcagtctcaccatttgcatcactgaggatgaaactgacttttgtcttttggagaaaaaaaactgtactgttgttcaagagggctgtgattaaaatctttaagcatttgttcctgccaaggtagttttcttgcattttgctctccattcagcatgtgtgtgggtgtggatgtttataaacaagactaagtctgacttcataagggctttctaaaaccatttctgtccaagagaaaatgactttttgctttgatattaaaaattcaatgagtaaaacaaaagctagtcaaatgtgttagcagcatgcagaacaaaaactttaaactttctctctcactatacagtatattgtcaatgtgaaagtgtggaatggaagaaatgtcgatcctgttgtaactga

SEQ ID NO: 214 - DNA, 514 bp, Homo sapiens
gagccatcgtgggaagactttacaggacatacctgaagactttctggaaatggatcttgcaaaaaatgagcacagagttcacgtgcaaatggagccggtatgacacactttcttacaacaacagccactgtgttggctggagagggatggggtgggcccaacggggacacaaggaggcagaggagctaacccctctactccactttcaaaactacattttaaagggaatgtgtatgtgaagagcactaccaacatcgcttttgttttgttttgttttgttttaagctttttttttttgcttgtttttaaagccaaaacaaaaaacaaccaagcactcttccatatataaatctggctgtattcagtagcaatacaagagatatgtagaaagactctttggttcacattccgatattaaaatagtgacatgaactggcaaagtggttttaaaagctttcacgtgggataaatgattttctttttttcttttctttcttcctatggtcttgtctga

SEQ ID NO: 215 - DNA, 543 bp, Homo sapiens
aatatatttcccaccaagtacctatatatgtatataaacaaacacattatctatatataacgccacactgtcttctgtttagtgtatggggaaagaccaatccaactgtccatctgtggctgggacagccagggggtgtgcccacggctgacccaggggtgtgcacacggctgagctgggagtcccgctggtctccctgaggactgagggtgaacttcgctctttgccttaaacctctttatttcattgcagtaatagttttacgttgtacataatagtgtaaacctttttaaaaaggaaagtataaaaacaaaagttgtaatttaaaagtctgaataaccatctgctgcttaggaaactcaatgaaatgacatgcctttttagcaggaagcaaagttggtttctgttttttgttttctttgttgttttagtttataaaacatgtgcattttacagttcagtatcaaatatttataatcttatgagaaatgaatgaatgtttctatttacaactgtgcttatcaaaattgtgaacacccccac

SEQ ID NO: 216 - DNA, 518 bp, Homo sapiens
ccaagagatgagctccgtggcctactccaaccttgcggtgaaagatcgcaaagcagtggccattctgcactaccctggggtagcctcaaatggaaccaaggccagtggggctcccactagttcctcgggatctccaataggctctcctacaaccacccctcccactaaacccccatccttcaacctgcaccccgcccctcacttgctggctagtatgcagctgcagaaacttaatagccagtatcaggggatggctgctgccactccaggccaacccggggaggcaggacccctgcaaaactgggactttggggcccaggcgggaggggcagaatcactctctccttctgctggtgcccagagccctgctatcatcgattcggacccagtggatgaggaagtgctgatgtcgctggtggtggaactggggttggaccgagccaatgagcttccggagctgtggctggggcagaatgagtttgacttcactgcggactttccatctagctgctaatgcc

SEQ ID NO: 217 - DNA, 480 bp, Homo sapiens
gcaccagatgcaacctcactatggtatgctggccagcaccctctcctgggggtggcaggcacacagcagccccccagcactaaggccgtgtctctgaggacgtcatcggaggctgggcccctgggatgggaccagggatgggggatgggccagggtttacccagtgggacagaggagcaaggtttaaatttgttattgtgtattatgttgttcaaatgcattttgggggtttttaatctttgtgacaggaaagccctcccccttccccttctgtgtcacagttcttggtgactgtcccaccggagcctccccctcagatgatctctccacggtagcacttgaccttttcgacgcttaacctttccgctgtcgccccaggccctccctgactccctgtgggggtggccatccctgggcccctccacgcctcctggccagacgctgccgctgccgctgcaccacggcgtttttttacaacat

SEQ ID NO: 218 - DNA, 472 bp, Homo sapiens
tcatgtagctcagctatggcacccccatgaacaagactataagaaaagttcccttgttttcacagctatcacatggatatcctttagttcttcagcctctaaacctactctgtattcaatttataatgccaattttcggagagggatgaaagagactttttgcatgtcctctatgaaatgttaccgaagcaatgcctatactatcacaacaagttcaaggatggccaaaaaaaactacgttggcatttcagaaatcccttccatggccaaaactattaccaaagactcgatctatgactcatttgacagagaagccaaggaaaaaaagcttgcttggcccattaactcaaatccaccaaatacttttgtctaagttctcattctttcaattgttatgcaccagagattaaaaagctttaactataaaaacagaagctatttacatatttgttttcactcaactttccaaggg

SEQ ID NO: 219 - DNA, 309 bp, Homo sapiens
gtccgcccagaagccatagacgagacgtaggtagccgtagttggacggacgggcagggccggcggggcagccccctccgcgcccccggccgtcccccctcatcgccccgcgcccacccccatcgcccctgcccccggcggcggcctcgcgtgcgagggggctcccttcacctcggtgcctcagttcccccagctgtaagacagggacggggcggcccagtggctgagaggagccggctgtggagccccgcccgccccccaccctctaggtggcccccgtccgaggaggatcgttttctaagtgcaatac

SEQ ID NO: 220 - DNA, 560 bp, Homo sapiens
ctgtgcagcagctgaccgacagcactcaaattaaaatggacattttggcgcaagttttacagattttattaaagtcgaagctattggtcttggaagatgaaaatgcaaatgttgatgaggtggaattgaagccagataccttaataaaattatatcttggttataaaaataagaaattaagggttaacatcaatgtgccaatgaaaaccgaacagaagcaggaacaagaaaccacacacaaaaacatcgaggaagaccgcaaactactgattcaggcggccatcgtgagaatcatgaagatgaggaaggttctgaaacaccagcagttacttggcgaggtcctcactcagctgtcctccaggttcaaacctcgagtccctgtgatcaagaaatgcattgacattctaattgagaaagaatatttggagcgagtggatggtgaaaaggacacctacagttacttggcttaacccttctggaagggtctgactgtgtgacccgcagcaaatagttcatgttggaaagaatgaaaacaacttcaagttcataggcagccagcc

SEQ ID NO: 221 - DNA, 280 bp, Homo sapiens
gtcagacgggcagaagtgccgagtgtgtctggcctggctggcctggcagaacccccacatgctcttcctggatgaacccaccaatcacctggatatcgagaccatcgacgccctggcagatgccatcaatgagtttgagggtggtatgatgctggtcagccatgacttcagactcattcagcaggttgcacaggaaatttgggtctgtgagaagcagacaatcaccaagtggcctggagacatcctggcttacaaggagcacctcaagtccaagctggtg

SEQ ID NO: 222 - DNA, 524 bp, Homo sapiens
tgcacagaagttagcgctatccccactgagtctcggcaaagaaaatcttgcagagtcctccaaaccaacagctggtggcagcagatcacaaaaggtcaaagttgctcagcggagcccagtagattcaggcaccatcctccgagaacccaccacgaaatccgtcccagtcaataatcttcctgagagaagtccgactgacagccccagagagggcctgagggtcaagcgaggccgacttgtccccagccccaaagctggactggagtccaagggcagtgagaactgtaaggtccagtgaaggcactttgtgtgtcagtacccctgggaggtgccagtcattgaatagataaggctgtgcctacaggacttctctttagtcagggcatgctttattagtgaggagaaaacaattccttagaagtcttaaatatattgtactctttagatctcccatgtgtaggtattgaaaaagtttggaagcactgatcacctgttagcattgccattcctctactgcaatgtaa

SEQ ID NO: 223 - DNA, 550 bp, Homo sapiens
tctcgggacgcatgaccttcacgagcaataagtccatggagatcgaggtgttggtggacgccgaccctgttgtggacagctctcagaagcgctaccgggccgccagtgccttcttcacctacgtgtcgctgagccaggaaggcaggtcgctgcctgtgccccagctggtgcccgagaccgaggacgagaagaagcgctttgaggaaggcaaagggcggtacctgcagatgaaggcgacgatcagggccacgcggacgctcagccctagactccctcctcctgccactggtgcctcgagtagccatggcaacgggcccagtgtccagtcacttagaagttccccccttggccaaaaacccaattcacattgagagctggtgttgtctgaagttttcgtatcacagtgttaacctgtactctctcctgcaaacctacacaccaaagctttatttatatcattccagtatcaatgctacacagtgttgtcccgagcgccgggaggcgttgggcagaaaccctcgggaatgcttccgagcacgctgtagggtat

SEQ ID NO: 224 - DNA, 233 bp, Homo sapiens
gatgaatgttttgcactttattgggaagacaacaagttttaccgggcagaagttgaagccctccattcttcgggtatgacagcagttgttaaattcattgactacggaaactatgaagaggtgctactgagcaatatcaagcccattcaaacagaggcatgggaggaagaaggcacctacgatcaaactctggagttccgtaggggaggtgatggccagccaagacgatccac

SEQ ID NO: 225 - DNA, 419 bp, Homo sapiens
ctgctgccacataaggtctttgaaggaaatcgcccaaccaactctattgtgttcaccaagctcacaccattcatgcttggagccttggtcgccatgtatgagcacaagatcttcgttcagggcatcatctgggacatcaacagctttgaccagtggggagtggagctgggaaagcagctggctaagaaaatagagcctgagcttgatggcagtgctcaagtgacctctcacgacgcttctaccaatgggctcatcaacttcatcaagcagcagcgcgaggccagagtccaataaactcgtgctcatctgcagcctcctctgtgactcccctttctcttctcgtccctcctccccggagccggcactgcatgttcctggacaccacccagagcaccctctggttgtgggcttggaccacg

SEQ ID NO: 226 - DNA, 265 bp, Homo sapiens
atggcaaaaatctccagccctacagagactgagcggtgcattgagtccctgattgctgttttccagaagtatgctggaaaggatggttacaaccgcaatctctccaagacggagttcctaagcttcatgaatacagagctggctgcctttacaaagaaccagaaggaccccggtgtccttgaccacatgaagaaactggatgtcagcagtgatgggcagttagatttcccaaaatttcttaatctgattggtggcctagctgtgg

SEQ ID NO: 227 - DNA, 467 bp, Homo sapiens
gggaccgggatttcatctggtgtgatagacacctctctactatataacgagtacattgtctatgatattgctcaggtaaatctgaagtatctgctgaaactgaaattcaattttaagacctccctgtggtaattgggagaggtagccgagtcacacccggtggctgtggtatgaattcacccgaagcgcttctgcaccaactcacctggccgctaagttgctgatgggtagtacctgtactaaaccacctcagaaaggattttacagaaacgtgttaaaggttttctctaacttctcaagtcccttgttttgtgttgtgtctgtggggaggggttgttttggggttgtttttgttttttcttgccaggtagataaaactgacatagagaaaaggctggagagagattctgttgcatagactagtcctatggaaaaaaccaaagcttcgttagaatgtctgccttact

SEQ ID NO: 228 - DNA, 277 bp, Homo sapiens
aagaggggcctgatgagactccactcaggtgcacacatcaccaggtgcatctgcaggcaccgggctggctgcttgcagccaggagaaggtcagcgagaaggagtgtatgagtgtgagtgtgtgtgcatggaagttggggcactgggcgtctgactccctccccacccaagagaggaaggacccctcaccacccccactggcgagacagtttactttgccgacttgccatgtttttgccaaaaccaagattttgaaggaaatgagtggccagcgccag

SEQ ID NO: 229 - DNA, 506 bp, Homo sapiens
  misc_feature (198)..(198): n is a, c, g, or t
  misc_feature (201)..(201): n is a, c, g, or t
  misc_feature (429)..(429): n is a, c, g, or t
  misc_feature (439)..(439): n is a, c, g, or t
gactgggcctggtacaagatcactgactctgaggacaaggccctcatgaacggctccgagagcaggttcttcgtgagttcctcgcagggccggtcagagctacacattgagaacctgaacatggaggccgaccccggccagtaccggtgcaacggcaccagctccaagggctccgaccaggccatcatcacgctccgncgntgcgcagccacctggccgccctctggcccttcctgggcatcgtggctgaggtgctggtgctggtcaccatcatcttcatctacgagaagcgccggaagcccgaggacgtcctggatgatgacgacgccggctctgcacccctgaagagcagcgggcagcaccagaatgacaaaggcaagaacgtccgccagaggaactcttcctgaggcaggtggcccgaggacgctnccctgctccngcgtctgcgccgccgccggagtccactcccagtgcttgcaagattccaagttctcacctcttaaaga

SEQ ID NO: 230 - DNA, 536 bp, Homo sapiens
cctgtgccctggcagttagccaagaggcggataagtgccccaccttagaacagtatgccatgagagcgtttgccgacgcactggaggtcatccccatggccctctctgaaaacagtggcatgaatcccatccagactatgaccgaagtccgagccagacaggtgaaggagatgaaccctgctcttggcatcgactgtttgcacaaggggacaaatgatatgaagcaacagcatgtcatagaaaccttgattggcaaaaagcaacagatatctcttgcaacacaaatggttagaatgattttgaagattgatgacattcgtaagcctggagaatctgaagaatgaagacattgagaaaactatgtagcaagatccacttctgtgattaagtaaatggatgtctcgtgatgcgtctacagttatttattgttacatccttttccagacactgtagatgctataataaaaatagctgtttggtaaccatagtttcacttgttcaaagccgtgtaatcgtgggggtactatctcaactgc

SEQ ID NO: 231 - DNA, 389 bp, Homo sapiens
ccatcgccacagaagcggtaccaggacaccccgggcgtggagcacattcccgtggtgcagattgacctctccgtccccttgaaggttccagggctgcctatgtcagatcagtatgtgaagctggaggaggagcggcggcaccggcagaagctggagaaggacaagaggaggaaaaagaggaaggagaaggagaagaagggcaagcgccgccacagctcgctgcccacggagagcgacgaggacatcgcccctgcccagcaggtggacatcgtcacagaggagatgcctgagaatgctctgcccagcgacgaggatgacaaagaccccaacgacccctacagggctctggatattgacctggataagcccttagccgacagcgagaaact

SEQ ID NO: 232 - DNA, 525 bp, Homo sapiens
ctcttcaccactgtggagaccctggagaaggaaaacccctggtactgcccttcctgcaagcagcaccagctggcaaccaagaagctggacctgtggatgctgccggagattctcatcatccacctgaaacgcttttcctacaccaagttctcccgagagaagctggacaccctcgtggagtttcctatccgggacctggacttctctgagtttgtcatccagccacagaatgagtcgaatccggagctgtacaaatatgacctcatcgcggtttccaaccattatgggggcatgcgtgatggacactacacaacatttgcctgcaacaaggacagcggccagtggcactactttgatgacaacagcgtctcccctgtcaatgagaatcagatcgagtccaaggcagcctatgtcctcttctaccaacgccaggacgtggcgcgacgcctgctgtccccggccggctcatctggcgccccagcctcccctgcctgcagctccccacccagctctgagttcatggat

SEQ ID NO: 233 - DNA, 501 bp, Homo sapiens
gaagggggccttttgagctagaagctttctattctgatccccaaggagttccatatccagaagcaaaaataggccgctttgtagttcagaatgtttctgcacagaaagatggagaaaaatctagagtaaaagtcaaagtgcgagtcaacacccatggcattttcaccatctctacggcatctatggtggagaaagtcccaactgaggagaatgaaatgtcttctgaagctgacatggagtgtctgaatcagagaccaccagaaaacccagacactgataaaaatgtccagcaagacaacagtgaagctggaacacagccccaggtacaaactgatgctcaacaaacctcacagtctcccccttcacctgaacttacctcagaagaaaacaaaatcccagatgctgacaaagcaaatgaaaaaaaagttgaccagcctccagaagctaaaaagcccaaaataaaggtggtgaatgttgagctgcctattgaagccaacttgg

SEQ ID NO: 234 - DNA, 432 bp, Homo sapiens
tgctgggctgggtcgcgtagcccagggtggaggcagaacgatgctgctgtggtagccctttgcctttcatgcccatgcttgattcttgcacctcagcagctgaaggtctcagagaccagtaatcagaaggcatccgactgcattaagtgtgcagcgctgaaaagacatttacaactaggccagggattagccactgtgggagggtggacaggcaatggttcagtggcctggctgttggcaggaactccaagtgcccaggcctcttgggcagcttagggccctgcctctgtttcatgatgcatgggtcatttgtcttgggtgtcctatcccatatggagaagaaaggggctctaagttctggctcttctttctttggggttctctgtacctgaggaaaccaggccctgggtgactttgcagatctgctcaccc

SEQ ID NO: 235 - DNA, 454 bp, Homo sapiens
tgtagaaggtgacgctctgggggcaggactcctccaaaattatgtggaccgtacggagtcgagaagcacagagcctgagttgatacaagtgaagagtgagctgcccctggatccgctgccagtccccactgaggaaggaaaccccctcctcaaacactatcgggggcccgcaggggatgccacggtcgcctctgagaaggaatcagtcatgtaaaccccgggagggaccttccctgccctgctgggggtgctctttggacactggattatgaggaatggataaatggatgagctagggctctgggggtctgcctgcacactctggggagccaggggccccagcaccctccaggacaggagatctgggatgcctggctgctggagtacatgtgttcacaagggttactcctcaaaacccccagttctcactcatgtccccaactcaaggctagaa

SEQ ID NO: 236 - DNA, 475 bp, Homo sapiens
gcaagaccgagagcacctgtggaagttgatcgaaggcggtgcccacatctacgtctgtggggatgcacggaacatggccagggatgtgcagaacaccttctacgacatcgtggctgagctcggggccatggagcacgcgcaggcggtggactacatcaagaaactgatgaccaagggccgctactccctggacgtgtggagctaggggcctgcctgccccacccaccccacagactccggcctgtaatcagctctcctggctccctcccgtagtctcctgggtgtgtttggcttggccttggcatgggcgcaggcccagtgacaaagactcctctgggcctggggtgcatcctcctcagcccccaggccaggtgaggtccaccggcccctggcagcacagcccagggcctgcatgggggcaccgggctccatgcctctggagcctctggccctcggtggctgcacagaagggctc

SEQ ID NO: 237 - DNA, 531 bp, Homo sapiens
ggtcaggcttggctgcaaaacactttattgatgtaggagctggtgtcatagatgaagattatagaggaaatgttggtgttgtactgtttaattttggcaaagaaaagtttgaagtcaaaaaaggtgatcgaattgcacagctcatttgcgaacggattttttatccagaaatagaagaagttcaagccttggatgacaccgaaaggggttcaggaggttttggttccactggaaagaattaaaatttatgccaagaacagaaaacaagaagtcatacctttttcttaaaaaaaaaaaaaaaagtttttgcttcaagtgttttggtgttttgcacttctgtaaacttactagctttaccttctaaaagtactgcattttttacttttttttatgatcaaggaaaagatcattaaaaaaaaacacaaagaagtttttctttgtgtttggatcaaaaagaaactttgtttttccgcaattgaaggttgtatgtaaatctgctttgtggtgacctgatgtaaacagtgtcttctt

SEQ ID NO: 238 - DNA, 543 bp, Homo sapiens
ggatcaggagaacgtacacccggatgtgatgctggtacaacccagagtagaatttattctgtctttcattgaccacattgctggagatgaggatcacacagatggagtagtagcttgtgctgctggactaataggggacttatgtacagcatttgggaaggatgtactgaaattagtagaagctaggccaatgatccatgaattgttaactgaagggcggagatcgaagactaacaaagcaaaaacccttgctacatgggcaacaaaagaactgaggaaactgaagaaccaagcttgatctgttaccattgggatgataacctgaggacccccactggaaatctcccatcttttgaaaaacctggaagtgaggagtgtgcacggatgctgaatgtttgggaatgagaggatgagtgagtgaggcttgaaaacacaccacattgaaaatcctgccacagcagcagccgcagccgccaacagcagcgctgttagtgagctaagtaagcactgacttcgtagaaaaccataacatcggccatcttg

SEQ ID NO: 239 - DNA, 460 bp, Homo sapiens
  misc_feature (173)..(174): n is a, c, g, or t
gaggaaagacgctctttaggttttgttttgtttttttttttttggttttgttttttgtttttttttttactctagggaaaacactgacgaatggtcagagctcctatcctgatcttttcatcaaggcgcctttcctaataatatggttcaactgtgaatgtagaagtgggggnnaggggggagaaaaagaaaactctggcgttagaggatataaaaaaatataagtacaattgttacaaataacgcagacttcaaaaacaaaaaaatcacaacccaaacaaaccaaaatttaaatgatcagaattggcagcacaaagaaaacgccctctcctgacttgtattgtggcagtctgaacgcccccagaaaattgtgccaaagagtttagaaaaataaatatacaataaaagtaaacacatacacacaaaacagcaaacttcaggtaactattttggattgcaa

SEQ ID NO: 240 - DNA, 498 bp, Homo sapiens
gttgaactcatgtttcagttcgcgaacattgactccttacgaaagtcacttcattctaactagatgcgcccacttccggtcattatttcgtttgcatgatgtattgcttcttcacgttttgtttttattgagcacggagtagaattccagggctgccttgacttcttccctgcatgctccctcccagtgactttccttccctttcacatgaggatctgccgttcatgttgctttctcctttgtcctcttggacttgagggcattgtgaaaagctttgctgtgatttaaaaatgccagcaattttaatctagcagtgttgaagctgggaattttttggcgcaatccatgtagcagtgacccaggcttgggagccagaaacaagtgtgacctgggattttatttaacacaactgttgccaaagagttggctttgtttatttggttttggcggggagaggagtggtatttgatgctttctgtggacaatgtaaccctaaac

SEQ ID NO: 241 - DNA, 378 bp, Homo sapiens
ggtcaaggctaaagccggagcaggctctgccaccctctccatggcgtatgccggcgcccgctttgtcttctcccttgtggatgcaatgaatggaaaggaaggtgttgtggaatgttccttcgttaagtcacaggaaacggaatgtacctacttctccacaccgctgctgcttgggaaaaagggcatcgagaagaacctgggcatcggcaaagtctcctcttttgaggagaagatgatctcggatgccatccccgagctgaaggcctccatcaagaagggggaagatttcgtgaagaccctgaagtgagccgctgtgacgggtggccagtttccttaatttatgaaggcatcatgtcactgcaaagccgttgcagataa

SEQ ID NO: 242 - DNA, 428 bp, Homo sapiens
tgtgtagcgtaggcttttcccaagggtcgctagaaactcgtcttcgcgttgccccctttctggctctcagcgccgtcgccactcgggagaggctgggtgaggcccgtgtgaggactgaccctggattcctcgaaactgccattgtgatcattactctgctctttggaaatggctgtatcatttttttgtactaatgtgaattgttcctcagaaacgcttcttttccatcctagtgagaagctggccctgcaggtggtggcagcaatggtgttgtaagatttcctcccgtagttttttctcctcatggatttgaatgaaatgccaataacacgtccactttcaacgtgtagtttacgcggagcactttcgaggcctggccgggttgggcctacttctcacctgggcctatcttctgaactcgctaggtt

SEQ ID NO: 243 - DNA, 534 bp, Homo sapiens
gaagataaccggctcattcacttcctcccagaagacgcgtggtagcgagtaggcacaggcgtgcacctgctcccgaattactcaccgagacacacgggctgagcagacggcccctgtgatggagacaaagagctcttctgaccatatccttcttaacacccgctggcatctcctttcgcgcctccctccctaacctactgacccaccttttgattttagcgcacctgtgattgataggccttccaaagagtcccacgctggcatcaccctccccgaggacggagatgaggagtagtcagcgtgatgccaaaacgcgtcttcttaatccaattctaattctgaatgtttcgtgtgggcttaataccatgtctattaatatatagcctcgatgatgagagagttacaaagaacaaaactccagacacaaacctccaaatttttcagcagaagcactctgcgtcgctgagctgaggtcggctctgcgatccatacgtggccgcacccacacagcacgtgctgtgacgatggctgaac

SEQ ID NO: 244 - DNA, 532 bp, Homo sapiens
cagaaagtctcagcccaggatggggcttcttcaacagggcccctgccctcctgaagcctcagtccttcaccttgccaggtgccgtttctcttccgtgaaggccactgcccaggtccccagtgcgccccctagtggccatagcctggttaaagttccccagtgcctccttgtgcatagaccttcttctcccacccccttctgcccctgggtccccggccatccagcggggctgccagagaaccccagacctgcccttacagtagtgtagcgccccctccctctttcggctggtgtagaatagccagtagtgtagtgcggtgtgcttttacgtgatggcgggtgggcagcgggcggcgggctccgcgcagccgtctgtccttgatctgcccgcggcggcccgtgttgtgttttgtgctgtgtccacgcgctaaggcgaccccctcccccgtactgacttctcctataagcgcttctcttcgcatagtcacgtagctcccaccccaccctcttcctgtgtctcacgcaagtttta

SEQ ID NO: 245 - DNA, 477 bp, Homo sapiens
  misc_feature (363)..(363): n is a, c, g, or t
  misc_feature (418)..(418): n is a, c, g, or t
tgcccatcgtcaacctcaaggacgagctgctgtttcccagctgggaggctctgttctcaggctctgagggtccgctgaagcccggggcacgcatcttctcctttgacggcaaggacgtcctgaggcaccccacctggccccagaagagcgtgtggcatggctcggaccccaacgggcgcaggctgaccgagagctactgtgagacgtggcggacggaggctccctcggccacgggccaggcctcctcgctgctggggggcaggctcctggggcagagtgccgcgagctgccatcacgcctacatcgtgctctgcattgagaacagcttcatgactgcctccaagtagccaccgcctggatgcngatggccggagaggaccggcggctcggaggaagcccccaccgtgggcagggagcngccggccagcccctggccccaggacctggctgccatactttcctgtatagttcacgttt

SEQ ID NO: 246 - DNA, 445 bp, Homo sapiens
gtcactaacctgtctcagtgtggccttgtccagccttgtgttttctgtaacccctgtttgtggtacgagataatgagtcctatttttctctcacataatatgcatttgctctcctaggacagtgtaatacatttatgtgaagtaaagacatgcgagactggtggcctgcaaatagcatccgtcaatctgtgttaactgcatagggagggctctgcatagcacctgctatagcggtgtcatgttggatcgcttttgtgactgttcatctgtccttgacagtggctgtcatcttgactactttgttgatttgttggtattggggacattttaaaggctgagttatttttgaatgtcatgtttatgtcatagacgtagttttcgcatccttgaattaaactgccttaactccttttgtggtataagcaaaactccatggactctgtcc

SEQ ID NO: 247 - DNA, 182 bp, Homo sapiens
tctgcagcctacgcatgaataggttggcaggtgtgggctggcgggtggactacaccctgagctccagcctgctgcaatccgtggaagagcccatggtgcacctgcggctggaggtggcagctgccccagggaccccagcccagcctgttgccatgtccctctcagcagacaagttccaggtc

SEQ ID NO: 248 - DNA, 403 bp, Homo sapiens
ttattcttctaattaacagctcctaggaaaatgtagacttttgctttatgatattctatctgtagtatgaggcatggaatagttttgtatcgggaatttctcagagctgagtaaaatgaaggaaaagcatgttatgtgtttttaaggaaaatgtgcacacatatacatgtaggagtgtttatctttctcttacaatctgttttagacatctttgcttatgaaacctgtacatatgtgtgtgtgggtatgtgtttatttccagtgagggctgcaggcttcctagaggtgtgctataccatgcgtctgtcgttgtgcttttttctgtttttagaccaattttttacagttctttggtaagcattgtcgtatctggtgatggattaacatatagcctttgttttct

SEQ ID NO: 249 - DNA, 487 bp, Homo sapiens
gccgtctcaaagtttcttagctgactttggctttcacatttgttctttccagagctaactgataagagtggaggaggaatgccttctcctaagagtcagttgaaagaaagacaagagagtcacatcttagcttttgcacaaggcattcgtggtcaggaataggttagggaatggtcacttctgattttccaacagttgctccttctctgaagagatcttgattcctttgggaagacaagaatttttcttaataacaaaggtccctttatgagttattccttctttcagttcatctcactggagcacagccaagatggacatgtttatggacagtgctctagatgtgaaaacagatagaactggtttgtgggacaggggcagcttgctcaggagagggaataacgcaggtcccttttcttggaaggcttgtactatggccatgacagtgacattgccctcaccatgatccctctccaaagtggttgtc

SEQ ID NO: 250 - DNA, 471 bp, Homo sapiens
tttgctatcagctcttctgctatgaagtagtaaaaggcagtctataattaactgacagacctaactgaagcacagagaatacatcagacttatgcatccaagacatcagaacttggattttatcaaacttgatgacttctctaaaaggagctttggaaacttcaaattcagctataggatagtaccaatgaacacatccagctgatcccaaaagctgttttcaggtataaggacaaggagaggagacaagtgacgacagccattcccctttgcagctatctactgtagtgacagccatttcttggttgatgggttggaagtcatcagaggtttgaagaattacactggcctttgtttttctggaaatgccgaccatggagatgctttagagtcttctcaaatagcttagatgttgtaatgaggttagctttgcttcataaaacaggggccctcagaagttctccttaaatt

SEQ ID NO: 251 - DNA, 529 bp, Homo sapiens
cctctacctgggttcgggtcaggagctccatctgggaactaacagctgctaacctgaccagccgctcaggacaggaccctggggctacactcctgcattgctgcaatactgctcccccagcctctcccctgcccctcaacctgccttagctgcactctcttacctacagctggacagtacctgtctgtttcctgtcctccttccagttacatctgtccatgtctggactcggctggccgttccctccagccccttgctggttatcttactctgagtgtgatgcagtcagaggcacctgcgggttagcccaggggcccaagccctggatttggcctgcggaggagcttaggatcctcgttttctgggttttggtgatgttggaggagtaccccccagcccaccgccccgattcctttttgcttctggtttggagctccggaccaggaccttcgtcctggtcagtttttaaataattatttagcagtgtaacttttaaacctgcgtgacatctacaaagcgcccaataaag

SEQ ID NO: 252 - DNA, 419 bp, Homo sapiens
  misc_feature (160)..(160): n is a, c, g, or t
gggtcattgtttaagatctggctggtggtacctagcctgctggaactggcatgggagaagctgcttgcggccttccctaaccttgcaaacctctcccgaacacaacttctgcaccttggactcacacagggactcatcgaacgcttgaaatgaggatttntggactgttcattgatactggaaatgttaatttaaagagactcctttatttatgggcagtgtagaatgtgctacaaagaggattggttaccctgatcaaggccttatttagaaaatacatcagatgcctttctgtaaattggtttttcagtttatggacatctcactttcccacgtgcttccttctttgcttctgttcctcctgacccattacatgcacatgtactcacatactccctcttccttctcgatggagttaa

SEQ ID NO: 253 - DNA, 358 bp, Homo sapiens
  misc_feature (134)..(135): n is a, c, g, or t
ttgcttttcctctaatcttgcaagagctatggctcttctattttccaatcacacagcttggcatgtaggaaaggttgaatgatcctctaagactgtgttggtcttcgtattctgtaaaacccattttttttttnngtggtcttacagatgtttagaaagtggcacaggttactgaattgtctacctgccagcattctgatatagcacaaaaagctattttcctttattttttgtattattttttatttttctggcattgagctctagggtggatgagggtttatggtcctctgatcataagctccattctaaaaactggtcactgttagctgaaattgctttggttccccaaatgcct

SEQ ID NO: 254 - DNA, 516 bp, Homo sapiens
ggcctttcccttctaaggtcattagattcagccaaaagcgacctcttctctagtccggtgttacgaacagaagttctgagttgtgctacaaaagtagttccatctttttggtgtaattttcacgtttttaatttgaaaaaaaaaaaaaaaacaactttttataagttttttaagggccctgcttagtcagtgtacagggtggagtcagaggcagttttcagaaaaaaaacaaaaaacaaaaaacaatttcaccaagcggtagtaattgttgttttactagttatacatttagaatataaaggaggcatcagaaaacacactctctaaagccacttccttgtgcacagagtctgcacagggagagcacaggcatctccctggaaaagcacctgccaatgacgaatttcatggaagaacctaggcaagaaaggaagcctctttctgagacacagtctctgagaggtgagcctagctttgctcttcctacagggtatgcttgggccatacacaatgctc

SEQ ID NO: 255 - DNA, 514 bp, Homo sapiens
gaccagttcttcggagagcacctgttggagtctgatcttttcccgacgtctacttccctgagtcccttctaccttcggccaccctccttcctgcgggcacccagctggtttgacactggactctcagagatgcgcctggagaaggacaggttctctgtcaacctggatgtgaagcacttctccccagaggaactcaaagttaaggtgttgggagatgtgattgaggtgcatggaaaacatgaagagcgccaggatgaacatggtttcatctccagggagttccacaggaaataccggatcccagctgatgtagaccctctcaccattacttcatccctgtcatctgatggggtcctcactgtgaatggaccaaggaaacaggtctctggccctgagcgcaccattcccatcacccgtgaaaagaagcctgctgtcaccgcagcccccaagaaaaagatgccctttcttgaattgcattttttaaaacaagaaagtttccccaccagtgaatgaa

SEQ ID NO: 256 - DNA, 500 bp, Homo sapiens
  misc_feature (267)..(267): n is a, c, g, or t
  misc_feature (409)..(409): n is a, c, g, or t
tcggacactggccttgggaacaatgttcgagagaacacttgccccttgactgtaggagccagaaggggacccaggtgtgcatagctctctgtagacatttttacccaaacctgttggtaaagtgcccatctggtgctcaagagagcctgggggtctaacagggagcccggctgcctcacctggccacagcctccacaccagatctccacattgtcttgatccagaccagctctgtgatcagaaggaaattgggtccagtgtaggagngagctggtcctgggcctggcaggcaagagtgtgggcatcctttcctggcctttctccactctccctcaagcctgtgctcaggttgccttgaatgtggactctggaagagccaggggcccagaatgccgggggaggcttctgngtggcactcatggaacaccgtccctctgccagccataggccctgcctccagtgtcagggaatggaggctgggctgcgagagtgttgctgcc

SEQ ID NO: 257 - DNA, 500 bp, Homo sapiens
atcgcaccgtttccagaagctgcgttgccaacgtcacatcccaaaatagtgttgacatccctgcctgcgctggcggtcccacccccgactcccaccaaagcggcacctcccgcgtaggtcaatgggctggagctgtcagagccgcggagctggctgtacctagaagagatggtcaactccttgctcaacacagcgcagcagctgaagacgctgtttgagcaagccaagcatgccagcacctaccgagaagctgccacaaaccaggccaagatccacgctgacgcagagcggaaggagcagtcctgcgttaactgcggccgggaggctatgagcgagtgcaccggttgccacaaggtcaactactgctccaacttctgccaacgcaaggactggaaggatcaccagcacatatgcggccagtcagcagctgtcaccgtccaggcagacgaagtccacgtggctgaaagcgtgatggagaaggtgaccgtgtgaggctccat

SEQ ID NO: 258 - DNA, 516 bp, Homo sapiens
agatgcctgtttgctatttggtggaagatagatgttcatattgaagcagtcacatttgtactgtagttcaataaaagaaaaatgaagtattctgtagcctatatttttcatagagctcatgagcatttactgtacttgctgggtcttgccaagatcatttattccgctgcattgccaaagtgtcttcataccaaattaaaggtggttttaatatatgtttcatggaagttgtttataaaattcaaaggtatttcatttaggtgaaaagtcttatttattaaagtggtttgaataaagtagatcaaaacttccagagatcttaatggctatataggaagaaatatcactcaccataatttaaataaagaataaaaatacatgtattttatggtggcaaatgtttggtagaactgtaattagaaaaatacaagtatatttgcgtgatggttacactagaagcccagactttacgactacacaatatattcatgtatctaaactgtacttgtaccccct

SEQ ID NO: 259 - DNA, 375 bp, Homo sapiens
ttttaccttggatgctgacttctaaatgaactgaagatgtgcccttacttggctgattttttttttccatctcataagaaaaatcagctgaagtgttaccaactagccacaccatgaattgtccgtaatgttcattaacagcatctttaaaactgtgtagctacctcacaaccagtcctgtctgtttatagtgctggtagtatcaccttttgccagaaggcctggctggctgtgacttaccatagcagtgacaatggcagtcttggctttaaagtgaggggtgaccctttagtgagcttagcacagcgggattaaacagtcctttaaccagcacagccagttaaaagatgcagcctcactgcttcaacgcagatt

SEQ ID NO: 260 - DNA, 427 bp, Homo sapiens
gtacgagacctgttccagatgaagctttttgtggatacagatgcggacacccggctctcacgcagagtattaagggacatcagcgagagaggcagggatcttgagcagattttatctcagtacattacgttcgtcaagcctgcctttgaggaattctgcttgccaacaaagaagtatgctgatgtgatcatccctagaggtgcagataatctggtggccatcaacctcatcgtgcagcacatccaggacatcctgaatggagggccctccaaacggcagaccaatggctgtctcaacggctacaccccttcacgcaagaggcaggcatcggagtccagcagcaggccgcattgacccgtctccatcggaccccagcccctatctccaagagacagaggaggggtcaggaggcactgctcatctgtac

SEQ ID NO: 261 - DNA, 463 bp, Homo sapiens
  misc_feature (435)..(435): n is a, c, g, or t
gaagatgtcggcagggctgggcttcagcctggaaggagggaagggctccctacacggagacaagcctctcaccattaacaggattttcaaaggagcagcctcagaacaaagtgagacagtccagcctggagatgaaatcttgcagctgggtggcactgccatgcagggcctcacacggtttgaagcctggaacatcatcaaggcactgcctgatggacctgtcacgattgtcatcaggagaaaaagcctccagtccaaggaaaccacagctgctggagactcctaggcaggacatgctgaagccaaagccaataacacacagctaacacacagctcccataaccgctgattctcagggtctctgctgccgccccacccagatgggggaaagcacaggtgggcttcccagtggctgctgcccaggcccagaccttntaggacgccacccagcaaaaggttgttc

SEQ ID NO: 262 - DNA, 531 bp, Homo sapiens
ttggaatgggcagctcatctctgtcccacttggcatcagctggcgtcatgcaaagtcatgcaaaggctgggaccacctgagatcattcactcatacatctggccgttgatgttggctgggaactcacctggggctgctggcctgaatgcttataggtggcctctccttgtggcctgggctcctcacaacatggtgtctggattcccaggatgagcatcccaggatcgcaagagccacgtagaagctgcatcttgtttatacctttgccttggaagttgcatggcatcacctccaccatactccatcagttagagctgacacaaacctgcctgggtttaaggggagaggaaatattgctggggtcatttatgaaaaatacagtttgtcacatgaaacatttgcaaaattgtttttggttggattggagaagtaatcctagggaagggtggtggagccagtaaatagaggagtacaggtgaagcaccaagctcaaagcgtggacaggtgtgccgacagaaggaaccagcgtgt

SEQ ID NO: 263 - DNA, 528 bp, Homo sapiens
gtatcgatatggttccttttccgtcaccctggacattgtccagggtattgaaagtgccgagatcctgcaggctgtgccgtccggtgagggggatgcatttgagctgactgtgtcctgccaaggcgggctgcccaaggaagcctgcatggagatctcatcgccagggtgccagccccctgcccagcggctgtgccagcctgtgctacccagcccagcctgccagctggttctgcaccagatactgaagggtggctcggggacatactgcctcaatgtgtctctggctgataccaacagcctggcagtggtcagcacccagcttatcatgcctggtcaagaagcagggggccttgggcaggttccgctgatcgtgggcatcttgctggtgttgatggctgtggtccttgcatctctgatatataggcgcagacttatgaagcaagacttctccgtaccccagttgccacatagcagcagtcactggctgcgtctaccccgcatcttctgctcttgtcccattggtgagaa

SEQ ID NO: 264 - DNA, 529 bp, Homo sapiens
gaatggtgcatacaaggccatccccgttgcccaggacctgaacgcgccttctgattgggacagccgtgggaaggacagttatgaaacgagtcagctggatgaccagagtgctgaaacccacagccacaagcagtccagattatataagcggaaagctaatgatgagagcaatgagcattccgatgtgattgatagtcaggaactttccaaagtcagccgtgaattccacagccatgaatttcacagccatgaagatatgctggttgtagaccccaaaagtaaggaagaagataaacacctgaaatttcgtatttctcatgaattagatagtgcatcttctgaggtcaattaaaaggagaaaaaatacaatttctcactttgcatttagtcaaaagaaaaaatgctttatagcaaaatgaaagagaacatgaaatgcttctttctcagtttattggttgaatgtgtatctatttgagtctggaaataactgatgtgtttgataattagtttagtttgtggcttcatggaa

SEQ ID NO: 265 - DNA, 372 bp, Homo sapiens
cctgcggaggtgggcggcatgcagctccgctttgcccggctctccgagcacgccacggcccccacccggggctccgcgcgcgccgcgggctacgacctgtacagtgcctatgattacacaataccacctatggagaaagctgttgtgaaaacggacattcagatagcgctcccttctgggtgttatggaagagtggctccacggtcaggcttggctgcaaaacactttattgatgtaggagctggtgtcatagatgaagattatagaggaaatgttggtgttgtactgtttaattttggcaaagaaaagtttgaagtcaaaaaaggtgatcgaattgcacagctcatttgcgaacggattttttatccagaa

SEQ ID NO: 266 - DNA, 409 bp, Homo sapiens
agtcaagtgaccagcctctgactgtgcctgtatctcccaaattctccactcgattccactgctaaactcagctgtgagctgcggataccgcccggcaatgggacctgctcttaacctcaaacctaggaccgtcttgctttgtcattgggcatggagagaacccatttctccagacttttacctacccgtgcctgagaaagcatacttgacaactgtggactccagttttgttgagaattgttttcttacattactaaggctaataatgagatgtaactcatgaatgtctcgattagactccatgtagttacttcctttaaaccatcagccggccttttatatgggtcttcactctgactagaatttagtctctgtgtcagcacagtgtaatctctattgctattgcccc

SEQ ID NO: 267 - DNA, 523 bp, Homo sapiens
ggtatcttcataaaatcggtgcactgagaatgcagctggacccatgtgaagatacctcactccagcccacttcctaggaacaatggaagaagaaaggactgaaccagggtatttttgttaggttttctatgtgactccaagagggaatggtcaagttgtttcatgagtttgcatgggcccttggaaaaacaggaaaggagcaatgaagatccaagcaaaactttactttcagcgttggcttggaggacaaataagaaatgaaacatcctatgaaatactttatagcacatggcagatttgcaactagtaaaatgctggtgaaatgctgttggtaaagcacatggtccaaatctagaagatgcagttcaaaaacaagacagactcgagttgttagggctgaggaaccaatcaaggtagaacaaagaaaatgttggggtaaaagtgttgctgattgtcaacacaaactggcttaataatattaataagaacctgtcttattaagactggctttagaaccgtaggt

SEQ ID NO: 268 - DNA, 161 bp, Homo sapiens
gtgcatgccatatgatcaggacagcttttccactttactcggtttcctacaagcaagtaggaaatacagtgaatttaccctaaaatgtccaatctgtatttatgtaccttgtcagtgttttgctgttggttttctaaaacaatctgatcaataaatcttat

SEQ ID NO: 269 - DNA, 445 bp, Homo sapiens
caacaagacggacctggctgataagaggcagataaccatcgaggagggggagcagcgcgccaaagaactgagcgtcatgttcattgagaccagtgcgaagactggctacaacgtgaagcagctttttcgacgtgtggcgtcggctctacccggaatggagaatgtccaggagaaaagcaaagaagggatgattgacatcaagctggacaaaccccaggagcccccggccagcgagggcggctgctcctgctaatgcagagccgacctgtggcttcccatgacactccttgcttgttgtgttgcttcctattggctagcttcctaaggggggagggaaccgagttatcaagatgggaggatttttcttttctctctgtctttaggagtagggtgggatggggagggaggctgggcatcagggatcacatcactcttaacggctgtt

SEQ ID NO: 270 - DNA, 503 bp, Homo sapiens
gacattgcctgtatgatcgggtaccgaccttgcccctggatgaaatggtgctggtccttcttcaccccgctggtctgcatgggcatcttcatcttcaacgttgtgtactacgagccgctggtctacaacaacacctacgtgtacccgtggtggggtgaggccatgggctgggccttcgccctgtcctccatgctgtgcgtgccgctgcacctcctgggctgcctcctcagggcaaagggcaccatggctgagcgctggcagcacctgacccagcccatctggggcctccaccacttggagtaccgagctcaggacgcagatgtcaggggcctgaccaccctgaccccagtgtccgagagcagcaaggtcgtcgtggtggagagtgtcatgtgacaactcagctcacatcaccagctcacctctggtagccatagcagcccctgcttcagccccaccgcacccctccagggggcctgcctttccctgacacttttggggtctgc

SEQ ID NO: 271 - DNA, 508 bp, Homo sapiens
tcaactccatagtgaagtctgatgtggacatccgcaaagacctgtacaccaacacagtgctgtctggcggcaccaccatgtaccctggcatcgcccacaggatgcagaaggagatcactgccctggcgcctagcattatgaagatcaagatcattgctcctcccaagcgcaagtactccgtgtgggtcggtggctccatcctggcctcgctgtccaccttccagcagatgtggatcagcaagcaggagtatgatgagtcaggcccctccattgtccaccgcaaatgcttctaggtggactctgacttagttgcgttacaccctttcttgacaaaaccaaacttctcagaaaacaacatgagattggcgtggctttatttgttttcttgtttcattttttgttttgttttttattggcttgactcaggatttgaaaaccggaacggcgaaggtgatagtagtcggttggagcgagcttcccccaaagttctacaatgtggccaaggact

SEQ ID NO: 272 - DNA, 502 bp, Homo sapiens
tcactgtcagtcgacacttccatgtccaggttttcccatcatatgattcccggtcctcctggtccccacacaactggcatccctcatccagctattgtaacacctcaggtcaaacaggaacatccccacactgacagtgacctaatgcacgtgtgctctgcttttctcctcccccatcccttcctcattccttcaaccccttcccctaaccaccaccaccaccaccttttaggaagcctcagcatgaacagagaaaggagcaggagccaaaaagacctcacattaagaagcctctgaatgcttttatgttatacatgaaagaaatgagagcgaatgtcgttgctgagtgtactctaaaagaaagtgcagctatcaaccagattcttggcagaaggtggcatgccctctcccgtgaagagcaggctaaatattatgaattagcacggaaagaaagacagctacatatgcagctttatccaggctggtctgcaagagacaatta

SEQ ID NO: 273 - DNA, 552 bp, Homo sapiens
aagccagctacagatgcatgcatattgtgaaaacccagatatagtgctgtgtggaaacaagagtgatctggaggaccagagagtagtgaaagagaaatatggaatcccctactttgaaactagtgctgccaatgggacaaacataagccaagcaattgagatgcttctggacctgataatgaagcgaatggaacggtgtgtggacaagtcctggattcctgaaggagtggtgcgatcaaatggtcatgcctctacggatcagttaagtgaagaaaaggagaaaggggcatgtggctgttgagaagtcaagtaagcgacatagtagttcaggtggcccatgcctgggatcttctctatgattgatacatggcacagtgagagattaatgggcattgtgtacaaattgcttctcaccatccccattagacctacgaataaagcatccggttctaaaattaatttgttgcagctttgtaaatatttctttaagattcagcctgagagttaggagaaatatttcagagccaaaagtgccttatacaaccttagcct

SEQ ID NO: 274 - DNA, 417 bp, Homo sapiens
ggagccccgtcataggaagtgaggtcttcctgcccaacagcaaccacgtggccagtggcgccggggaggcagaggaacgcgttgtggtgatcagcagctcggaagactcagatgccgaaaactcgtcctcccgagagctggatgacagcagcagtgagtccagtgacctccagctggaaggccccagcaccctcagggtcctggacgagaaccttgctgacccccaagcagaagacagacctctggttttctttgacctcaagattgacaatgaaagtgggttctcctggggctacccccacccctttctaatttagtctctgagtcccaaaaagaagtgcaggcagagccatctgccaggcccaggagagctctgagctctggccaacaactgcagccaggctgggcagagcactc

SEQ ID NO: 275 - DNA, 510 bp, Homo sapiens
gttctgcgggatggtgcagttccccggcgacgtgaggaggcaggccctcctgcagctgtgtctgctcctctgccaccgtttcccgctgatccggaagaccacggccagccaggtgtacgagacattgctcacctacagtgacgtcgtgggcgcggatgtgctggacgaggtggtgactgtgctcagtgacactgcgtgggacgcggagcttgcagtggtgagagagcagcgcaaccgtctgtgtgaccttctgggcgtacccaggccccagctggtgccccagcctggtgcctgctgaagccagtcctggagcccatacctcacccctgcctggtgaggatgtcttgttcctgagggaggccggtgtggaaagcctcgcacagtggtgcctccagctgttgaagggtagcgctggcccttggaggctggcactagctgacagcttttcctctctgcacctgcgctctggtgacttggggtggacgcctctgccttcacttgaacacaaat

SEQ ID NO: 276 - DNA, 551 bp, Homo sapiens
ggatggggcttcttcaacagggcccctgccctcctgaagcctcagtccttcaccttgccaggtgccgtttctcttccgtgaaggccactgcccaggtccccagtgcgccccctagtggccatagcctggttaaagttccccagtgcctccttgtgcatagaccttcttctcccacccccttctgcccctgggtccccggccatccagcggggctgccagagaaccccagacctgcccttacagtagtgtagcgccccctccctctttcggctggtgtagaatagccagtagtgtagtgcggtgtgcttttacgtgatggcgggtgggcagcgggcggcgggctccgcgcagccgtctgtccttgatctgcccgcggcggcccgtgttgtgttttgtgctgtgtccacgcgctaaggcgaccccctcccccgtactgacttctcctataagcgcttctcttcgcatagtcacgtagctcccaccccaccctcttcctgtgtctcacgcaagttttatactctaatatttatatggctttttttcttcgacaa

SEQ ID NO: 277 - DNA, 533 bp, Homo sapiens
ccttgactggctacccaggggaggagctggaggaagaggaggaaagtcaagggggcgtgaagcttggcctcggggacttcatcttctacagtgtgctggtgggcaaggcggctgccacgggcagcggggactggaataccacgctggcctgcttcgtggccatcctcattggcttgtgtctgaccctcctgctgcttgctgtgttcaagaaggcgctgcccgccctccccatctccatcacgttcgggctcatcttttacttctccacggacaggaagcacagcaggtttatccagatgaactgagaaggtcagattagggcggggagaagagcatccggcatgagggctgagatgcgcaaagagtgtgctcgggagtggcccctggcacctgggtgctctggctggagaggaaaaaccagttccctacgaggagtgttcccaatgctttgtccatgatgtccttgttattttattgcctttagaaactgagtcctgttcttgttacggcagtcacactgctgggaagtggct

SEQ ID NO: 278 - DNA, 238 bp, Homo sapiens
ctgggctccgaggtgtacaggatgctgcgggagccggccgagcccgtggccgcggagcccaagcagtcaggctccttccgctacttgcagggcatgctagaggccggcgagggcggggcaccatcgtcaaggcacgggacaagctctaccatcccgagtgcttcatgtgcagtgactgcggcctgaacctcaagcagcgtggttacttctttctggacgagcggctctactgtgagag

SEQ ID NO: 279 - DNA, 491 bp, Homo sapiens
gctctttcctgaagcgcagcaagctcggccggtacaacgaggaggagcgggctcagcaggaggccgaggccgcccagcgcctggccgaggagaaggcccaggccagctccatccccgtgggcagccgctgtgaggtgcgggcggcgggacaatcccctcgccggggcaccgtcatgtatgtaggtctcacagatttcaagcctggctactggattggtgtccgctatgatgagccactggggaaaaatgatggcagtgtgaatgggaaacgctacttcgaatgccaggccaagtatggcgcctttgtcaagccagcagtcgtgacggtgggggacttcccggaggaggactacgggttggacgagatatgacacctaaggaattcccctgcttcagctcctagctcagccactgactgcccctcctgtgtgtgcccatggcccttttctcctgaccccattttaattttattcattttttcctttgccatt

SEQ ID NO: 280 - DNA, 268 bp, Homo sapiens
agcagatcatgaagacaggggcccttttgcttcaggggatgattgccgccgtggacacagactccccccgagaggtctttttccgagtggcagctgacatgttttctgacggcaacttcaactggggccgggttgtcgcccttttctactttgccagcaaactggtgctcaaggccctgtgcaccaaggtgccggaactgatcagaaccatcatgggctggacattggacttcctccgggagcggctgttgggctggatccaagacca

SEQ ID NO: 281 - DNA, 261 bp, Homo sapiens
gctctatttccaggcatgtgatcgcccccgctctccagattccccagcactctgctgcgtgtaactccactcaattctccactcatccttccttgtgaagcaggatcgttgaagttttaagtatgggcaaaaatctggaaaacttaggatccctctgacaccccaggattaggggacacagcagtggctagggcatcagccacagaactgagcgggaaatgccacttgtattggctgtaaagaaatcctggctttgggcca

SEQ ID NO: 282 - DNA, 372 bp, Homo sapiens
  misc_feature (43)..(43): n is a, c, g, or t
tccaaggactgagactgacctcctctggtgacactggcctagngcctgacactctcctaagaggttctctccaagcccccaaatagctccaggcgccctcggccgcccatcatggttaattctgtccaacaaacacacacgggtagattgctggcctgttgtaggtggtagggacacagatgaccgacctggtcactcctcctgccaacattcagtctggtatgtgaggcgtgcgtgaagcaagaactcctggagctacagggacagggagccatcattcctgcctgggaatcctggaagacttcctgcaggagtcagcgttcaatcttgaccttgaagatgggaaggatgttctttttacgtaccaattct

SEQ ID NO: 283 - DNA, 398 bp, Homo sapiens
  misc_feature (335)..(336): n is a, c, g, or t
  misc_feature (338)..(338): n is a, c, g, or t
tccccgctagcttggggcgagcagagctgcatccagtggaactaaagccgttccaggattatcaaaaactgagcagcaaccttgggggacctggatcatcacggactcccccaactggaaggtccttctctggcctcaattcccgtctcaaggccacgccttccacctacagtggagtcttccgcacccagcgcgtcgacctttaccagcaggcctccccaccagatgccctgcgctggatacctaagccttgggagcggacagggccgccacctcgagaagggccctcccgacgggcagaggagcctgggtcccgaggggacaaggagcctggnntngcccccaccccgctgagggagttcctcttgccccctacccccggggcttgtatatagatt

SEQ ID NO: 284 - DNA, 478 bp, Homo sapiens
tgtagatttagtttgacgctccccaaagtgcatgagacacatgctaaaattacaaattaaaattttgggtcagactttgccataatgatagactcaatttagctctctgaactagttggtaattttttttttttaattcccactttggctgtgtacatcaaatgaaatgagaagtgtgtatgctgaccaaaccacaagaaactttctttaagttgtgttaaagaggaaagacctagaatccaagcgtgttacatgaaaattgtaacagagcagctgcttccacctttcagatatagatgttggaaccacagcagaagttatagagcgacaacttatatacacacctagaatgtaagttaaacaaaataccggcttccagagaccccttttctccagccatattacatcaggctagaagtaattaatgttgatttatttcatctacaagcagttggtccctaagtgaaaggctctgctt

SEQ ID NO: 285 - DNA, 336 bp, Homo sapiens
  misc_feature (299)..(299): n is a, c, g, or t
gtctgcctctccaggattgtatgtttcaagccttgtcctgtgttcctttgtctgacgctctgtgtattgctctttgaatcgagtttggaggaagagttgagttgtatgagtggcggcatgttggtagtgccggacttcctgtttcaagttttctggggcctcgctaattgaatgtggaaagtagcaccacttgacggctacaagtgccgactcctgaattttcccatggtgttctgacttcaagggctggcagccagggagaatgggcccaggggaagcaaagacctcttccctctgcngtttctgtcccacttaactgacctcactggaggctac

SEQ ID NO: 286 - DNA, 262 bp, Homo sapiens
  misc_feature (47)..(47): n is a, c, g, or t
  misc_feature (81)..(81): n is a, c, g, or t
tcttgacatcctagcttcttctaaggggggagggaaaggggggagantttttatatatatatacatatatatatatcaagntttaaattattgatagttcatctggattaccaaaatcactctgcagccctgcccgaggctagtaggctgcaaccctggtccccacccctaacctcctgctccccctcaagccaactatgcagcccacaagaaggccctgcgggcccccccattgcccagcactgtctcatagaaggctctg

SEQ ID NO: 287 - DNA, 388 bp, Homo sapiens
  misc_feature (70)..(70): n is a, c, g, or t
  misc_feature (72)..(78): n is a, c, g, or t
  misc_feature (80)..(80): n is a, c, g, or t
  misc_feature (82)..(82): n is a, c, g, or t
tttccctttgttcttttatcatagagacctgcctatttattctttggcgccatctggagtactacttgtnannnnnnnangnccacggattctcaagattccttatttgcctcgagaaccttgtttaaaagcagaagactgcaagattccttcgcctcagaaaccaatctagattttagaagtgggctggctatagtgagccaacatgatttagaccagcttcaggctgatgcaatcaacgcttttggagaatcactacaaaagaaacttctggacattgaaggattatattcaaaagttcgatctcgatatagtttcatacaggctcttgtcagacgtatccgtggcctcttgaggatatcaaggaactgagagcccgtgcttatgc

SEQ ID NO: 288 - DNA, 438 bp, Homo sapiens
  misc_feature (300)..(300): n is a, c, g, or t
  misc_feature (303)..(303): n is a, c, g, or t
gagctcactgtgggatggggttgacctctgccgcctgcctgggtatctgggcctggccatggctgtgttcttcatgtgttgattttatttgacccctggagtggtgggtctcatctttcccatctcgcctgagagcggctgagggctgcctcactgcaaatcctccccacagcgtcagtgaaagtcgtccttgtctcagaatgaccaggggccagccagtgtctgaccaaggtcaaggggcaggtgcagaggtggcagggatggctccgaagccagaaatgccttaaactgcaacgtccngtnccttccccacccccatcccatccccacccccagccccagcccagtcctcctaggagcaggacccgatgaagcgggcggcggtggggctgggtgccgtgttactaactctagtatgtttctgtgtcaatcgctgtg

SEQ ID NO: 289 - DNA, 509 bp, Homo sapiens
  misc_feature (440)..(440): n is a, c, g, or t
  misc_feature (448)..(448): n is a, c, g, or t
gtcttccctacctcaggcaggaagggcaggaaggagagcctgctgcatggggtggggtagggctgactagaagggccagtcctgcctggccaggcagatctgtgccccatgcctgtccagcctgggcagccaggctgccaaggccagagtggcctggccaggagctcttcaggcctccctctctcttctgctccacccttggcctgtctcatccccaggggtcccagccaccccgggctctctgctgtacatatttgagactagtttttattccttgtgaagatgatatactatttttgttaagcgtgtctgtatttatgtgtgaggagctgctggcttgcagtgcgcgtgcacgtggagagctggtgcccggagattggacggcctgatgctccctcccctgccctggtccagggaagctggccgagggtcctggctcnctgagggncatctgcccctcccccaacccccaccccacacttgttccagctctttgaaatagtctgtgt

SEQ ID NO: 290 - DNA, 442 bp, Homo sapiens
  misc_feature (286)..(286): n is a, c, g, or t
ttagcaacactcatagttttgccaattaccagtagacactagtggaaccatctaactggaacttcctctctccttccacttatttcctcaaacttgttgctttacactagacacatgcaaatgtatgttttaaacacaccaaaacagatcatgccaaatgagttgcctgtcaaaggctggagggcaggaggagggcctgggtttgggttctttcctcccagcctttggatggtgccttgggccccttagccccagcgccagggcctcccagctgaggccacagganaagcacttttttatgatgtactaaaagccacagtatgtggcaactgcaaaaggatcaggaatttagggtatgatctcggtcacgtgtcccgggcgctgaggggaaaggaagcgggcatgattgtagacaatgagggggttctcttgatgtaatgaa

SEQ ID NO: 291 - DNA, 467 bp, Homo sapiens
gagacactagttttggccaacttaagattttacgttaatttttacatagtatttgacactcatgcaaaataatgtgaaaacatctagatttagtagtttattctgcgccttttgttaaaactgaagattttggaaaatggttgtcactgctcttccagcctatgaatatttttgtgaaatggaaccatggatttatgtctggatcatccatacagaaccaacaattttattcaaaaacaatgtgttcatcaaagtaattgctcacattgtgcagtactatgttgtacagaccacgtgaaagggaatgctggtctagctggcgtggtatgtttataggcgaatttcagcagaaggaagccaaaatagttttttccttttgaaagttttttaaaaattatttcatgggtcttttttttaattaatatgtgtgcattgttacaatgtatgttggatgtcttttgacccta

SEQ ID NO: 292 - DNA, 356 bp, Homo sapiens
ttagagccatcatcatcccaggcagggatatctttgagaaatgactcagttcagccccaggcccctgtgactctgcttaaagcacacatttctgctgactcttgtacctggggcagcaggataatcaccaacacactcttaacgagaaacaacacaccaagcacagtggagctgtcctaggcaacactcgcggtctcaggctgcggtgggcgtctgtcctgcatgtggcccagaccaccctgacccccgggcctgcctgcctggccctgcatgctgcacgctcactgtatttgtgcagatcctggccagtacaaagtcgttgctcttgtcttatcttctcttacagagtctccctc

SEQ ID NO: 293 - DNA, 203 bp, Homo sapiens
gtctccctccctttatagaatgtcaaccaaagagtgccctcctcccctctcagcctcctctttagctagcctccccatctcatcacaacgcatgtctgtgacctttggtaatcatttacagtgccacacggaaccctgtattttgcacacagcaaaacaaacaatgtttagctttatttatggtatttgatgctgtaaatgga

SEQ ID NO: 294 - DNA, 487 bp, Homo sapiens
aagaaccagtgtcaatccgcagaccctctgtgaagccaggccggccgggccgagccagcagcccctctccctagactcagaggcgccgcggggaggggtggccccgccgaggcttcaggggccccctccccaccaaagggttcacctcacacttgaatgtacaacccaccccactgtcgggaaggcctccgtcctcggcccctgcctcttgctgctgtcctgtccccgagcccctgcaggtccccccccgcccccccactcaagagttagagcaggtggctgcaggccttgggcccggagggaaggccactgccggccacttggggcagacacagacacctcaaggatctgtcacggaaggcgtcctttttccttgtagctaacgttaggcctgagtagctcccctccatccttgtagacgctccagtccctactactgtgacggcatttccatccctcccctgcccgggaagggaccttgcaggga

SEQ ID NO: 295 - DNA, 528 bp, Homo sapiens
  misc_feature (153)..(153): n is a, c, g, or t
  misc_feature (351)..(351): n is a, c, g, or t
ctggccggggatttgcgaaccaaagcgaccattgagctcaaggccctcaggctgctgaacttccagaggcagctgcgccaggaggtggtggtgtgcatgcggagggacacagcgctggagacagccctcaatgctaaggcctacaagcgcagnaagcgccagtccctgcgcgaggcccgcatcactgagaagctggagaagcagcagaagatcgagcaggagcgcaagcgccggcagaagcaccaggaatacctcaatagcattctccagcatgccaaggatttcaaggaatatcacagatccgtcacaggcaaaatccagaagctgaccaaggcagtggccacgtaccangccaacacggagcgggagcagaagaaagagaacgagcggatcgagaaggagcgcatgcggaggctcatggctgaagatgaggaggggtaccgcaagctcatcgaccagaagaaggacaagcgcctggcctacctcttgcagcagacagacgagtacgtggctaacctcacggagctg

SEQ ID NO: 296 - DNA, 438 bp, Homo sapiens
  misc_feature (121)..(121): n is a, c, g, or t
cagggcaactcccagggatgtggtgacatgcagggttcaagtgttcttggttccaggcacctcccggctcacggggagctcagaggtccatgccgaggagaccaggcaggacctcccgagnctgcgccccggccggcccatgcgttttgtgatcccaagtgactctgtgggaagggtggggacgaggcgtcgggagggtatacagggagcccctcccgtgcatggctgcccccccgttcattttctccaccacagccgcttgcacgtatagatactgtggtcccctttcttttaatatataaattatgtatggtgaagtggagtgtattgtgtaggtcccgtatttaatgcctctgactgcctttgaagcgcagccctctgtggcccgcagccccctgagcctggctgttgtgtggtatttatgctctctttgtctgc

SEQ ID NO: 297 - DNA, 497 bp, Homo sapiens
aagctcccattttgtaaccactagtttgcggttgacttgagtactctggtgacttcctgcgtcaagcgttctcaagctgtgagaatgtgcgcagctccaggcaggttttctctcggagagttaagtcttcccttgaaggcagggaagcaggatggatacacatatatcacacgcataaaacaccaggtgcgggagcagcccagactcaaggctgactaaactggaggctgaataccgtggaggtccacatgcagcttccctggagggcaggccggaggcgctcccgcccctgggcttgaggatgctgcaccccgtgggcttccaggcctgcccagatgatgccttcaggcctctgtccctggcggccatcctcaggccgattttgaccagcaatgatagactcttcttaaccctttcaaaataaatttttcagtgggacagaaaggagagttaaaaaacatttttttaaaggtggtaacatctgacccacaaaggga

SEQ ID NO: 298 - DNA, 557 bp, Homo sapiens
  misc_feature (73)..(73): n is a, c, g, or t
  misc_feature (244)..(244): n is a, c, g, or t
cctcatccgctacatgagctctgggcctgtggtggccatggtctgggaagggtacaatgtcgtccgcgcctcnagggccatgattggacacaccgactcggctgaggctgccccaggaaccataaggggtgacttcagcgtccacatcagcaggaatgtcatccacgccagcgactccgtggagggggcccagcgggagatccagctgtggttccagagcagtgagctggtgagctgggcagangggggccagcacagcagcatccacccagcctgaggctcaagctgcccttaccaccccatcccccacgcaggaccaactacctccgtcagcaagaacccaagcccacatccaaacctgcctgtcccaaaccacttacttccctgttcacctctgccccaccccagcccagaggagtttgagccaccaacttcagtgcctttctgtaccccaagccagcacaagattggaccaatcctttttgcaccaaagtgccggacaacctttgtggtgggggggggtcttcacattatcataacctctcctctaaagggga

SEQ ID NO: 299 - DNA, 449 bp, Homo sapiens
  misc_feature (60)..(61): n is a, c, g, or t
atagggttttcttgggcgaggatgtgctggattaggaaaggtgacatgacacaggcagannagagtggcacccaccacagaatacagtgtgtgttattacgaggagccagcagttgagcctaaggtccttctacctacctggtattggcatttgaggtcggaaaccctctactgccccataagccaggaaaagtgaaaagagaacacagttcctttaagaactggcagcaaggcttgaggccttatgtatgtagctgagtcagcaaggtacatgatgctgtctgctttcaaaaggacttttctctcctagctgactgactccttccttagttcaaggaacagctgagacagacctctgctgagtagctctgtgatgacaaagccttggtttaactgaggtgatcctcaggttgtgaggtttattagtccccaaggcaaacacaaatatt

SEQ ID NO: 300 - DNA, 311 bp, Homo sapiens
  misc_feature (125)..(126): n is a, c, g, or t
atcaagtccaactgaaacatcagaacaaataagagagaaataagaatagaatgaatgaccccaaaatagggttttcttgggcgaggatgtgctggattaggaaaggtgacatgacacaggcagannagagtggcacccaccacagaatacagtgtgtgttattacgaggagccagcagttgagcctaaggtccttctacctacctggtattggcatttgaggtcggaaaccctctactgccccataagccaggaaaagtgaaaagagaacacagttcctttaagaactggcagcaaggcttgaggccttat

SEQ ID NO: 301 - DNA, 395 bp, Homo sapiens
gctctggtgctagatgccactgtagccagatctccaacagtgccttggaccatggactcatactcaactgagtaagaaggggctggtgcccagtcggggtggctgagctggtccttaataggttgtttcttggtcttgctttcttcatgccctccccactgctcctgccacctttagataagtttctctagctaattttgtggccaatgtaaaattcgtcatcaacctaacaaacacaaccttctcagcagcatttctcccctgtgatggaaataaagtgtttagggcagtgggaggagaaaattctccaggtgaatggggaagggtctgttccagcctctccctactcccatcccatttccaccaactggggaactgtgactatctatctcccc

SEQ ID NO: 302 - DNA, 517 bp, Homo sapiens
tatgttatgtgtgtgactcccttgtgtgtatctgtgccagcctcagcctccgagttgcttttccctctggccctgactctcactgactcaccgatgtgatgtgcaggcccacttcttaccccagatagcctcgggcgctgcctgtagtcatgctgacagctgtacagtagccgccaagactgctgacagctggagacggttctggtttcaactacggtatattgatatcggaagtattctagacagatcctcggttgggttttctagctacatgtttgtattgcacagatccccacctgccatcctatagtgttgtcttcctgtgtgttccggggcttctgggcagctgggcctgcccggggaagtccttgcaggtgggaggccatacagagacccactgtgtgccactgagcgtcccactgctgctgggcaactggaggactgcagggggcgccaggtgactctctccttttatatcacagcagctcctgtgctgaccttcaagttacgttttgga

SEQ ID NO: 303 - DNA, 520 bp, Homo sapiens
  misc_feature (51)..(51): n is a, c, g, or t
  misc_feature (392)..(392): n is a, c, g, or t
tgtagtgttgtaaacctgcctcacaaaatacatggtaataacttttctttnaaaaaaaaaaaaaaagacagcctttacaccatttctagtggcacactattttggcaatgttatgcaccacttcaatttccccattgtgacccctatcacttcatttgatatccctttttgacccacccatctccttcatatatgggcatgtccatagattgacaaagaaagtttacacttttgaataaagatgcaaagtatgcaaaaacattaatactgatgcgaaaaaataaaaaataaaagagaaacaaggcagaggaagaaggtgtttaagctctcctcgacctgttggaatggtggttaacagaatgatttgagatgggatctgtggggaggggagnaaaaaaaaaaacaacaaaatttggtgcttaaaaaaaagtaaaataaaaaaagacatctttaaaatcaatccctggttgtagacaagttctccaaaaccagtacctggcaccactccaacaaacaaacg

SEQ ID NO: 304 - DNA, 329 bp, Homo sapiens
gctggcttcgtttttccaaggagcctttggtgagttcaattatctggtaaatatccagcgcttcacctgaaagatagtgcaaattggttaggatgccacctcaagaactgtaactgagagctcagaagtgagcaaaggagcttaatgctaaggtcaaaaggagagtgaaaggttgagaacaattgccacgaacggtaatgttacatgttaggagggtctgttttctttttatataagtgtgtcttagatatattttaaatagaaaataagctttctgatttacttgtttggtatttaaagcacagtttgtttttctgtcacctatagag

SEQ ID NO: 305 - DNA, 521 bp, Homo sapiens
  misc_feature (481)..(481): n is a, c, g, or t
tacatttttccacgagctggtgcagacagctctgccatcaggcagctgtgtggacaccttgttaaaggacttgtgcaaaatgtacaccacacttacagcccttgtcagatattatctccaggtgtgtcagagctccggaggaattccaaaaaatatggaaaagctggtgaagctgtctggttctcatctgacccccctgtgttattctttcatttcttacgtacagaataagagtaagagcctgaactatacgggagagaaaaaggagaaacctgctgccgttgccacagccatggccagagttcttcgggaaaccaagccaatccctaacctcatctttgccatagaacagtatgaaaaatttctcatccacctttctaagaagtccaaggtgaacctgatgcagcacatgaagctcagcacctcacgagacttcaagatcaaaggaaacatcctagacatggttcttcgagaggatggngaagatgaaaatgaagagggcactgcatcagagcatgggg

SEQ ID NO: 306 - DNA, 496 bp, Homo sapiens
ctttctgcctgtactggatctgttattttcagggaaacaggccccagggcccccctgagcctcaccctaagcccttaggcctctgagagtgctgttgggttctatttatttatttatttgttcctttgttccctacccgtgcccccagtgtcttccctgctgagtaccaggagaggtcctgccccatcctctctctgaagccagggcccttccattccatttagcctttggatcatcctggctgggagaagtgggaccgagccacccagccccactatccccaagcagccctacagccgggatgggaggcacgtggcctctcttttatccgtctatttattttgtaagtgtattcgtgtggaggaggttgttgctttatttttttaaggctctggagtgttgtgtatggtttcttttcacatcccagcctcccatgggcacttctaagaagagaggggatttcttggaaaaggagagaggaatcccctagagcagg

SEQ ID NO: 307 - DNA, 503 bp, Homo sapiens
  misc_feature (158)..(158): n is a, c, g, or t
  misc_feature (216)..(217): n is a, c, g, or t
  misc_feature (231)..(231): n is a, c, g, or t
  misc_feature (250)..(250): n is a, c, g, or t
  misc_feature (261)..(261): n is a, c, g, or t
  misc_feature (291)..(291): n is a, c, g, or t
  misc_feature (297)..(297): n is a, c, g, or t
  misc_feature (341)..(341): n is a, c, g, or t
  misc_feature (352)..(352): n is a, c, g, or t
  misc_feature (365)..(365): n is a, c, g, or t
gcgggccacagacgtcggaagaaactcccgtatttgcagctggaactgcagcccacggcgccccggttttcctccccgccctgtccctctctggtcaaacaacatactaaagaggcgaggcaatgactgttggccagttctcaccggggaaaaacccnactgttaggatggcatgaacatttccttagatcgtggtcagctccgaggaatgtggcnnccaggctctttgangagccatgggctgcacccnggccgtaggcntagtgtaactcgcatcccattgcagtgccngtttcnttgactgtgttgctgtctcttagattaaccgtgctgaggctccnacatagctccntggacctgtgtcntagtacatactgaagcgatggtcagagtgtgtagagtgaagttgctgtgcccacattgtttgaactcgcgtaccccgtagatacattgtgcaacgttcttctgttattcccttgaggtggtaacttcgtatgttcagt

SEQ ID NO: 308 - DNA, 434 bp, Homo sapiens
tgagagctgtctaggtctgtatcccagattgttgcttaatgacatctgacagatgcattgttttctgaaatcagcttaagacaccaattgtggcaactggaaactcattacctgctgcattggatcaactatggaagttggagcaggggtgggcggaggtcacctaaccaatcaatggaaggcaactcacacctgctccaagcctcagctttgagaaacaaacacgtttataagaaaaaatatatagctattattacagaagtgaatatgttgtgctctcttactgctcttggtgcattgacagtttctgtatctcaaccctattcatctttatgaaaaagcattctgaagatctatcctcagcactgctgagtgtgcagtcacactttcctaccaacccccttcttaccatctctagctgccatttgtggggg

SEQ ID NO: 309 - DNA, 572 bp, Homo sapiens
  misc_feature (163)..(163): n is a, c, g, or t
  misc_feature (486)..(486): n is a, c, g, or t
  misc_feature (547)..(547): n is a, c, g, or t
aacaggcccctatagggaagcagttccatgaaaatgattaattctttccaaaagacttaaaattttttcctatttcaattttcctttcaaaaaaggaaatacattcatgtagttcaaaacttaagaaaacaaaagtctgttcagcaaaagactcccactccgnttccccaaacgctgagccccaccccccatccctggtagcaagaagtgtttccaattttaaggttaagaaacaaagtccctggatttgtgttagggatgtcttcctgagagtgggttgtgttccgtttgaccctggcggttgacctcggcccactaggatcatgccgccctctccagggaggagggcctccccatcaccctgtacagtggcaccccagccctggcactgcccgcccttgctcagcgtacctttcccatggcactctgacgtactggatgtttggtttctgaagttactggctgtttaccctgccgggatgtaancccctccagggcaggggcttgtctcgtgttcagtgctgcatcccagctgctgggcacggtncctggtccatggcgttcaataaata

SEQ ID NO: 310 - DNA, 549 bp, Homo sapiens
  misc_feature (73)..(73): n is a, c, g, or t
tttttgatgtgcgtgctgtctgtcctatggagcctctgcagactcgttctcgtgacccagtggcataccgttnggtgtctgatgtgtgcccagatcgttctgccacttgcactgtgcttgctcctaagcaaaagggaaaaggagcgcgcgtgatagaagaaaagcactgggagaactaacagaggagaaaggtgaaacacacacacattcttaaggcaataaaactagggggtgtatattatcttctggtgcatgttcttttctggaaaatatggtagctcgccaaccgcatctgctcatctgatattcaaacacacagtattcgtgaataagttgattctgtcccccacgtggactctgtgctcacccattgtctcattgccagtggtgtccaagggcccccgttgggacccacggctctcgtccctctgctccgtgtgtctcatgccagcagcacgtcgccatccgtcaccagaattagtcctcacagcctaggaccagttttgtatcaaactcgtctgatgttttgatgccatttgtcttttgtaa

SEQ ID NO: 311 - DNA, 463 bp, Homo sapiens
  misc_feature (37)..(37): n is a, c, g, or t
gctacatgagggtgtccctgtccagctttctggcacntgagtcctgtgtggagagttacctcctcttccagggactgtgctgttgggaactttgggcaagtcacttacctctttgtgcctcaatttctgtataatatttctaagctacctcactgaggtggtatgaagattcactaatgtatgtagcgtgtttgtcaatcctccagtgaaaagcactatctagatcacattttggatcacattagccaaatgcagtaaatggccaaattagatgtgtgctgaagacaatcagtcactgggtctatattaaacagcaaccagagcaacaaatggcaaacaatttctattttcaagtttctttgcatatttttttggtgcaaaaccatttataaacttttttttctaacactagtgtctacagcagcattcaaaaaaattctgttaccttttctgtattaggatt

SEQ ID NO: 312 - DNA, 238 bp, Homo sapiens
tgggatctcagatcctttgtcactgcctatagacttgtagctgctgtctctctttgtccctgcagagaatcacgtcctggaactgcatgttcttgcgactcttgggacttcatcttaacttctcgctgccccagccatgttttcaaccatggcatccctcccccaattagttccctgtcatcctcgtcaaccttctctgtaagtgcctggtaagcttgcccttgcttaagaactcaaa

SEQ ID NO: 313 - DNA, 497 bp, Homo sapiens
  misc_feature (26)..(26): n is a, c, g, or t
  misc_feature (61)..(61): n is a, c, g, or t
  misc_feature (64)..(64): n is a, c, g, or t
  misc_feature (68)..(68): n is a, c, g, or t
  misc_feature (117)..(117): n is a, c, g, or t
  misc_feature (148)..(148): n is a, c, g, or t
  misc_feature (173)..(173): n is a, c, g, or t
  misc_feature (214)..(214): n is a, c, g, or t
  misc_feature (218)..(218): n is a, c, g, or t
  misc_feature (231)..(231): n is a, c, g, or t
  misc_feature (275)..(275): n is a, c, g, or t
  misc_feature (293)..(293): n is a, c, g, or t
  misc_feature (305)..(305): n is a, c, g, or t
  misc_feature (318)..(318): n is a, c, g, or t
  misc_feature (323)..(323): n is a, c, g, or t
  misc_feature (435)..(435): n is a, c, g, or t
gcagtgagccaagacagtgccagtgnactccagcctcggtgacagcgcaaggctccgtctnaanaatnaaaaaaaaaaaaaaaaaaaaaaggccgggcgcagtggctcaagcctgtngtcccagcactttgggaggctgaggcgggcngatcacctgaggtcaggagttttgngatcagccttggcaacacggtgaaaccccatctctactaanaatncaaaattagccangcatgctggcacatgcctgtaatcccagctactcgggaggctgnggtacgagaatcgcttgnacctgggaggcngaggatgcagtgngccgngatcacgccattgcactccagcctgggggacaagagtgaatctgtgtctcaccaaaaaaaaaaagaaaaagaaagatgcttaacaaaggttaccataagccacaaattcatnaccacttatccttccagtttcaagtagaatatattcataacctcaataaagttctccctgct

SEQ ID NO: 314 - DNA, 563 bp, Homo sapiens
  misc_feature (431)..(431): n is a, c, g, or t
gcagcagatcatgagtgacccagccatgcgccttatcctggaacagatgcagaaggacccccaggcactcagcgaacacttaaagaatcctgtaatagcacagaagatccagaagctgatggatgtgggtctgattgcaattcggtgatgacttgttcatccccccttcccttcgccctcatgtggaaagaggagctgggaccgcggcgagcagcacggagcggaagggagagcaggggagagaaggcctcatctctctatatttatacataaccccggggaagacacagagactcgtacctgcgctgtttgtgccgccgctgcctctgggccctcccagcacacgcatggtctcttcaccgctgccctcgagttccatgtctctttcccctgcccctagttgctgtctcggctgctctcccatagttggnttttttttttatttggggcagtgggcatgttatggggaggggagggggttcttccagcctcaggtcccagctgtctcacgttgtttattctgcgtccccttctccaataaaacaagccagttgggcgtggtt

SEQ ID NO: 315 - DNA, 524 bp, Homo sapiens
  misc_feature (29)..(29): n is a, c, g, or t
  misc_feature (39)..(39): n is a, c, g, or t
  misc_feature (41)..(41): n is a, c, g, or t
  misc_feature (45)..(45): n is a, c, g, or t
  misc_feature (47)..(47): n is a, c, g, or t
  misc_feature (55)..(55): n is a, c, g, or t
  misc_feature (187)..(187): n is a, c, g, or t
  misc_feature (373)..(373): n is a, c, g, or t
aacagcacctttctcattgagcttcctcnactgacctcngncccncnttgggatntcatcttctgaccgaaccctgatgttcagtggcagagacagcccatagccagaactgtgggtagaccagggttggggtgtgcggtttgggacagcccaaaccccagccgctgtgtcaaggcctaggacgccntgctgccatcaaaagggggttccaggtttccatcagtggcctaaagaagggacttcttgttgtactgaggagtgcggaattaaagagatttgactccctttagtattgggggcagtccgttccccagacactgtggcctctgaagtggaaactgaaagctgcatacctgggaaagaactttctagnaataggcaatggccttcagtggaagagggagggctggaggtgtgcccagtacttggatgttcatctgtccacaacagctttttgtttttttaaaaaagctaaaatggaaatggattttatcataaaggatgacatcgttttcttctacaat

SEQ ID NO: 316 - DNA, 559 bp, Homo sapiens
ggtgtgcttcgtgctgtagttatcgttagttcctcttcccgagatggggccgccgagagaccccagcgcctttgaaaagcaaggtttgtgctgcgcttccagttccgaaaagcagatgtttaagcccttggactgagggtgggatcgcagctccgaagacggagaggagggaaatggggccctttcccctctattgcatccccctgcccgactccttccccgcacccacgtgccctagattcatggcagaaaatgaccaaatcctgtgtatttgttttatatatttaataactgttttaaatgaaagttttagtaaaaaaaatacaaaacaaaaagattaaattgctattgctgtagtaagagaagctctttgtatctgaacatagttgtatttgaaatttgtggttttttaatttatttaaaattggggggagggcatgggaaggatttaacaccgatatattgttaccgctgaaaatgaactttatgaaccttttccaagttgatctatccagtgacgtggcctggtgggcgtttcttcttgtacttatgtggtttt

SEQ ID NO: 317 - DNA, 504 bp, Homo sapiens
  misc_feature (44)..(44): n is a, c, g, or t
  misc_feature (63)..(63): n is a, c, g, or t
  misc_feature (94)..(94): n is a, c, g, or t
gtgcctcaggagtattcttctacaccagctgctgttaaaatgtncaatgaactctagtcccanggaatacagaagtgctcttattaccagtttncccacttgtggccgcctttgcaaagatccatattctaatttaagtccccaacctctgaatttggttttaagtttacctagtgactgactactctctttataaaaaagaccttatacttaatgatcatttccaaaggagaccactccttaacttttactgcaaacccaacaagatgagacacttaaacccagacagatgtaacaaaggatttttgttgtctaagtcccaaagtattatatagaaagttcctgcttttatgggtaaacttattaccttaatatgttctgtggtttgctgttaaccaagattctcccatttaaaatgccacagaccgaccctcaaggcagatccgaaagcctagtagttagttgcactgggttgttttgacaagctaccacacgtcttaagta

SEQ ID NO: 318 - DNA, 568 bp, Homo sapiens
acaggcggtgtgagcatccatgtgtggtcttggtctaaaccagctcttgaacaggttaaagcaaacagcaataacaaaacaaaaactactgatgctgagcgttttgatcctagtaatatttcaaatattgtccttctgcatatgttctatccatatttgattccaatatacattattaagctttcttgggtactattttgctggggctcttgcgtgaaggtggtacctgtctcatgatccttaaaagagagaggcttttttcatccaaagctgtagtgttgggaactggggtgggagaggcactttttggaattctgaaagaatcatatctgtgtatatacatactgagtggggaaggatgggggttggcaggggttgagggaggtgggaacaaacagtgagtatgggaacaggcagtcacctcgagtgtgggaggtcacctgggtccgtcgtcttccttctgtatggtgttgggtttatgtacacactataacacttcctgtgtgagttcatgtacctgtctgtgagtgctttggtgtattgagcctcagtacactccaagggcatt

SEQ ID NO: 319 - DNA, 543 bp, Homo sapiens
  misc_feature (36)..(36): n is a, c, g, or t
  misc_feature (62)..(66): n is a, c, g, or t
  misc_feature (402)..(402): n is a, c, g, or t
ttaaagtacttctctagtcattgaagtttttttttnctttacataaatattgatatattctnnnnnctactcaaagtgccaaaggctacagtttttaatgacttaacaaattgtaccacattgttaaggacatataatgatagacactagaactcagacctctgcatgtatatttgataacatgtcttttgtaaaacaaaaattacaaaaaaatttgtttacattccactggtaccttaatttaaaataaatcagactaaaaggtggtatctcttcttagtgttctatttatcttatttgctaatgggagcacttcttcctttgttaggctgtgctttactgataaaaccaagtattgaataaagagagttaattatctttttaaagtaaataaaattatgnaaatatatatagtatatataaagtactgtgtttaaaaaaatgttatgcaatgttttccaaactgataaagtttgtaaagtgctataaatgtattttgttaagtacagataaaagctattgtgtgagtatattgtgctaaaa

SEQ ID NO: 320 - DNA, 258 bp, Homo sapiens
gagagacgctccattgtgaataaagagctcataccagctcctaagccctattaagaagaggcctggtcctctaatgccttgtttccatttcagttgttctttgagagacagaatgatgtactaaccattcgtgattattaagatagggttgggtcagggcttagggagggggcagaaatattggggatagaaaaaaaatctgatcattcctcagtgctacccatttctgtcctgtgtgggctgcttagctagacagca

SEQ ID NO: 321 - DNA, 263 bp, Homo sapiens
  misc_feature (92)..(92): n is a, c, g, or t
  misc_feature (190)..(190): n is a, c, g, or t
aggggaagaaacgacagcctcacttctgtatggactgctgatgtggcctgccatcctgttcagcgggcattgtctttggagcagcaggagantaggatgcctctcactcacatgccagttcctggctggccagctgctcagggctcaggctggggcctcccattgacatcctccccctacactccctctntgagcctccgtcgcccctcctgttgggtaagggtgttgagtgtgacttgtgctgaaaacctggttcatatata

SEQ ID NO: 322 - DNA, 529 bp, Homo sapiens
gactgtctcatgtatctgcaagggccgaggaaattaatgacccaaggaggctatgatatggtccaaaaacttttcctggattttttccgtaggcggctgagccagaggccaactgcagaggaactggaacagaggaacattttgaaacctcggaatgaacaagaggaacaggaggagaagagagagatcaagaggaggctaacccgaaagctcagtcaaaggcccacggtggaagagcttcgggaaagaaagatcctcatccgcttcagtgactacgtggaggtggctgacgctcaggactatgaccgcagggcagataagccgtggacccgcctcaccgctgcagacaaagctgccatccgaaaggagctcaatgaattcaaaagcactgagatggaagttcatgaattgagtagacacttaacaaggtttcaccgaccttaacagtcgaattcctcttgagtgctatgctgtcttcaaaacataaatttataagaaccataagtgctggtatttattcacttcccca

SEQ ID NO: 323 - DNA, 467 bp, Homo sapiens
gacatggtaccagatgcgctgcagcagaacccgggcgccttcaggctagctcccgccctgcctgcccggccccaccgaggcctgagcacgttcccgggtgccgagcactgcctccgggcttcccccaagaccacgcttagcggtggcttcttcgttgctgtaattgaacgggtcgagatgccgacgtgagtgagtgggggcatgcttgggaggcgcaggatggtactggcacatctaacatctacacttctctagctcagcctcacaggccaaagcatcagcaccagaacgcacacccagcccagccccaaagagaaagaagagacagcaaagagccgcagccggtgcttgcacaccgccttgcacatagcagaggctccaggctgactccttcctggtgggaaaggaagatgcctgtcctctccgtggaggaccctgggccctcaccgcaggcagcagtttgcatt

SEQ ID NO: 324 - DNA, 145 bp, Homo sapiens
gagaattccgaattggggaacacacgatacctgtttttcttttccgttgctggcagtactgttgcgccgcagtttggagtcactgtagttaagtgtggatgcatgtgcgtcaccgtccactcctcctactgtattttattggaca

SEQ ID NO: 325 - DNA, 208 bp, Homo sapiens
  misc_feature (85)..(85): n is a, c, g, or t
  misc_feature (100)..(100): n is a, c, g, or t
  misc_feature (102)..(102): n is a, c, g, or t
  misc_feature (119)..(123): n is a, c, g, or t
  misc_feature (125)..(126): n is a, c, g, or t
  misc_feature (128)..(128): n is a, c, g, or t
  misc_feature (148)..(148): n is a, c, g, or t
cctggggctgagcaaggcctacgtaggccagaagagcagcttcacagtagactgcagcaaagcaggcaacaacatgctgctggtnggggttcatggcccnangaccccctgcgaggagnnnnngnngnagcacgtgggcagccggctntacagcgtgtcctacctgctcaaggacaagggggagtacacactggtggtcaaatggggg

SEQ ID NO: 326 - DNA, 354 bp, Homo sapiens
gctccactgcttaaaccacaggacctggttaactcctcaccaagcttcccacgaccctggttgccaatgggcgcgggagacattgtatacacatcatgctatttaaaatacgttcaaactatagtgtaaatgctaattaaccatattggtatataaccggaattttatattaaaaggggcctcctttttaaatatatgccgtgtaaaaaatgtacttataggaacatctctttgaattgtatttcttgtatattacatacttagagagagactcttttagccaggcaaagtcttttttggctgtggctggaataaatcatttattacttgggagtcccattttggacactaata

SEQ ID NO: 327 - DNA, 518 bp, Homo sapiens
  misc_feature (61)..(65): n is a, c, g, or t
  misc_feature (71)..(71): n is a, c, g, or t
  misc_feature (73)..(73): n is a, c, g, or t
  misc_feature (112)..(112): n is a, c, g, or t
  misc_feature (163)..(163): n is a, c, g, or t
  misc_feature (295)..(295): n is a, c, g, or t
aaggactggtatctttctgtgagcaataaggactggataaagactgcatatccttgtgtcnnnnncagcancnatacaataaggagggttttaatgtgaagcaggcaatctnccagccccttctggtcttggatgaaatagttgcacagagtattgcaccaanaatacacaatggaggctgaaaagttcaacatattttaagtcaattaatcaaattgcattgattcttgatgctttcttagaggcctacatgatttcttagattgctctgataaactatcataaggggtccacntcccctcatttagctcccccagggatttcttttcccccatgtcatacacccagtcctaaatcaacccccaaggctatccttccatcccttctgcagagggaacttttgtcagactctgcaacaaactcctagctctatccagagtgtcctctgctgctaagattggtatctttctcctcaaaagcctggatggtgaatgggggtgcattagtcagaattctcc

SEQ ID NO: 328 - DNA, 509 bp, Homo sapiens
ccaaaggttgtttctcccattgtgcatgtccttcagtctcggccccatacccatcaccccattcttcaccctcatgcttccatcccaaggcaaacatgtgtcttcatcggaatctatgggtgttgaagttaaatgtgggggcagagatttaacaccatgacactaatacaaatcaaccattcttcactttcaaatggttaatcactacaggaaggcgaactcttttcttggtttttgtttaaaaacattttatacatatatatgtatatatgtgtgtgtatgtatggacataggtatgtatatgcacatgtacatgtatatatgtatatatccatcttcaatataaatatatcataagtgagagttgtaaatactccttggtcatatgtctgtctttctcatagtatcatatcttcaatgttatgttaacaactccatttattgattgatgaaatcgtgtgtagacctgtatcctcctgacatagtttatgtagggtctcttctcaaat

SEQ ID NO: 329 - DNA, 539 bp, Homo sapiens
  misc_feature (27)..(27): n is a, c, g, or t
  misc_feature (40)..(40): n is a, c, g, or t
  misc_feature (49)..(49): n is a, c, g, or t
  misc_feature (64)..(64): n is a, c, g, or t
  misc_feature (84)..(84): n is a, c, g, or t
  misc_feature (90)..(91): n is a, c, g, or t
atgaacgacctggtgtccgagtaccancagtaccaggacnccacggccnacgaacaaggggagntcgaggaggaggagggcgangacganncgtagatgcccccgcgagacgggttagggaaagcggaggaggaaagcgagggggtggggggcttcccgggacgataacctggcagtggaaggaaagaagcatggtctactttaggtgtgcgctgggtctctggtgctcttcactgttgcctgtcacttttttttccttttttgtaatattgatgacatcaatgtaacatttgagatatttctgaattactgttgtaatggctaaaatcacataaacgtttgtgtcggaatggtgtcctctctttctcttcctttttctctttattaacgatttaaatgtaactttctgaacacattgcattgaattcttcctttaacaaaaagcaaaggcgtaggtaaaagctcaaatgaatttattctttcggtatggtaaaattgaaccaatcacagttaagatgagagatcaacctgagttttaa

SEQ ID NO: 330 - DNA, 471 bp, Homo sapiens
taaaaaacagcaccctatcctgcttccccacatttctgttcctccaatgaagggctaagactatttagtaatctctttcttaagcagaggagtggcaaggatggcaatcttgaattttattttctgtagagatagcatttcttctggtgcggagctgaaaggaatccacccagaagttctgtagcatcctgcgtgcagcctcctggagccccagactccatctgggggagggacttgtttacaagcagttctgaccaccttagtggtgtactgttttctaggcaaaaaatatctgtctgttgtactgtatagcctttaaaatgcagtccaggaatgagactcttttaagaaacacatcctgcttctgcaattccagagagtgctgggggaaaaaaagggataaaaattcctacctactcatcagtgtttgaaagatggagctgaatagcttttcttgttcctggactaggc

SEQ ID NO: 331 - DNA, 559 bp, Homo sapiens
  misc_feature (56)..(59): n is a, c, g, or t
  misc_feature (61)..(66): n is a, c, g, or t
  misc_feature (68)..(69): n is a, c, g, or t
  misc_feature (88)..(88): n is a, c, g, or t
  misc_feature (127)..(127): n is a, c, g, or t
tgcacttgcccacccaagagaaggagctcggtgacatttgaggatgaagtggaacnnnncnnnnnngnngccaagaactcgattcttnatgtgaaagctgaagtacacaagtccttggacagttacncagcaagcttggccaaagccattgaggccgaagccaaaatcaacttatttggggaggaggctttgccaggggtcttggttacagcacggactgtcccggggggcggcttcgggggccgccgaggcagcagaactcttgtgagccagaggctgcagttgcagagcatcgaagaaggagatgttttagctgccgagcagagatgagggcctcagggtgccgtggggctgcagcctgagaggctggcccggggaggagttcccatcaccgcctgtgccgcggccttgggagcatgtcactgtgtacagctggccacacacagggaaggagcagcatctggtatgcagccaccaggacaaggactgaaaataatgtctacagtccacagcttcagcatttccagagaccacatgtgagcttcttttaggtcccagt

SEQ ID NO: 332 - DNA, 115 bp, Homo sapiens
tcccgacgggcagaggagcctgggtcccgaggggacaaggagcctgggttgcccccaccccgctgagggagttcctcttgccccctacccccggggcttgtatatagattataaa

SEQ ID NO: 333 - DNA, 486 bp, Homo sapiens
  misc_feature (96)..(96): n is a, c, g, or t
  misc_feature (99)..(100): n is a, c, g, or t
  misc_feature (106)..(108): n is a, c, g, or t
  misc_feature (119)..(119): n is a, c, g, or t
  misc_feature (152)..(152): n is a, c, g, or t
  misc_feature (175)..(175): n is a, c, g, or t
  misc_feature (212)..(213): n is a, c, g, or t
  misc_feature (226)..(226): n is a, c, g, or t
  misc_feature (233)..(233): n is a, c, g, or t
  misc_feature (237)..(237): n is a, c, g, or t
  misc_feature (248)..(248): n is a, c, g, or t
  misc_feature (250)..(250): n is a, c, g, or t
  misc_feature (252)..(252): n is a, c, g, or t
  misc_feature (263)..(263): n is a, c, g, or t
  misc_feature (266)..(266): n is a, c, g, or t
  misc_feature (296)..(297): n is a, c, g, or t
  misc_feature (302)..(303): n is a, c, g, or t
  misc_feature (321)..(321): n is a, c, g, or t
  misc_feature (337)..(338): n is a, c, g, or t
  misc_feature (341)..(341): n is a, c, g, or t
  misc_feature (351)..(351): n is a, c, g, or t
  misc_feature (409)..(409): n is a, c, g, or t
  misc_feature (446)..(446): n is a, c, g, or t
  misc_feature (450)..(450): n is a, c, g, or t
  misc_feature (455)..(455): n is a, c, g, or t
  misc_feature (461)..(461): n is a, c, g, or t
tgacctgctgtagaacatagggatactgcattctggaaattactcaatttagtggcagggtggttttttaattttcttctgtttctgatttttgtngtnnggggtnnntgtgtgtgttngtgtgtgtgtgtgtgtgtgtgtgtgtgtgtgtntaacagagaatatggccagtgcnttgagttctttctccttctctctctctcttttttttnnaaataactcttcngggaagntggntttataagccntntngccaggtgtanacntgttgtgaaatacccaccactaaagttttnnaagtnnccatattttctccattgngccttcttatgtattnncanagattattcntgtgcactttaaatttacttaacttaccataaatgcagtgtgacttttcccacacagntggattgtgaggctcttaacttcttaaaagtataggnggcntcgtngtgaantcctataagcagtctttatgtctct

SEQ ID NO: 334 - DNA, 473 bp, Homo sapiens
  misc_feature (191)..(192): n is a, c, g, or t
ccaggccggggctggagggattcggccgcggcctccggtcctgggcgcttcccttttaagcaagggcgcctcacctgctcttcaagaaacagcgagagggagacccagggggctgaaacttgaactctggttcttttaaaattaattttggttggtgttgggggaggcgcgagtgcgtgtgagaagaaccnncccaccccgcgcaaggggaagcctcctgtctcccctttccccgcgtccgagaaggcggaaacccacagtgttacctgacttatgaaacttgaaaccgcctctggagccgccattctgcagagtatttggaaaaagaaaaaagggtttatgcttacgtctctggggtcggggggattatgtcacgagcgttcaaactgctggaaatctcaaaactgtactgtctttatttttgtatattgtatttatatataaaaagaaacgtctacgtatgcatgctaaat

SEQ ID NO: 335 - DNA, 562 bp, Homo sapiens
  misc_feature (241)..(243): n is a, c, g, or t
  misc_feature (247)..(247): n is a, c, g, or t
  misc_feature (251)..(253): n is a, c, g, or t
  misc_feature (256)..(256): n is a, c, g, or t
  misc_feature (259)..(259): n is a, c, g, or t
  misc_feature (261)..(264): n is a, c, g, or t
  misc_feature (339)..(348): n is a, c, g, or t
  misc_feature (352)..(353): n is a, c, g, or t
  misc_feature (355)..(355): n is a, c, g, or t
  misc_feature (357)..(357): n is a, c, g, or t
  misc_feature (359)..(360): n is a, c, g, or t
  misc_feature (362)..(366): n is a, c, g, or t
  misc_feature (404)..(404): n is a, c, g, or t
  misc_feature (537)..(537): n is a, c, g, or t
gaggcatgacggattgcacctgaatcctatctgacgtttcattccagcaagaggggctggggaagattacattttttttcctttggaaactgaatgccataatctcgatcaaaccgatccagaataccgaagatcggcacaggacagaaaagcgagtcgcaggaggaagggagatgcagccgcacaggggatgattaccctcctaggaccgcggtggctaagtcattgcaggaacggggcnnngttntctnnnggnacnannnnggagctcatctctttggggtcacagttctattttgtttgtgagtttgtattattattattattattattattatnnnnnnnnnntttnntntntnngnnnnntgagcaactcaaagaggcagaagaggagaatgactttnccagaatagaagtggagcagtgatcattattctccgctttctctttctaatcaacacttgaaaagcaaagtgtcttttcagcctttccatctttacaaataaaactcaaaaaagccgtccagcttatcccatnctctgattgtcttctgacttaaggg

SEQ ID NO: 336 - DNA, 189 bp, Homo sapiens
  misc_feature (85)..(85): n is a, c, g, or t
tctgacttccatctgggggctgagaccacccttgcctgcccccttctttctgccttaagaatgtccttttaggctgggcatggtnggctcacgcctgtaaccccagcactttgggaggcggagacgggcagataacctgaggtcaggatttcgagaccaacctgacctacatggagaaactccgcctct

SEQ ID NO: 337 - DNA, 523 bp, Homo sapiens
  misc_feature (38)..(38): n is a, c, g, or t
  misc_feature (47)..(47): n is a, c, g, or t
  misc_feature (74)..(74): n is a, c, g, or t
  misc_feature (86)..(86): n is a, c, g, or t
  misc_feature (109)..(109): n is a, c, g, or t
  misc_feature (434)..(434): n is a, c, g, or t
  misc_feature (456)..(456): n is a, c, g, or t
tgaggagattgccatggcgaccgtcacagcgctgcgcngcacagtgncccccgctgtcactgggatcaccttcntgtctggaggcnagagtgaggaggaggcgtccatnaacctcaatgccattaacaagtgccccctgctgaagccctgggccctgaccttctcctacggccgagccctgcaggcctctgccctgaaggcctggggcgggaagaaggagaacctgaaggctgcgcaggaggagtatgtcaagcgagccctggccaacagccttgcctgtcaaggaaagtacactccgagcggtcaggctggggctgctgccagcgagtccctcttcgtctctaaccacgcctattaagcggaggtgttcccaggctgcccccaacactccaggccctgccccctcccactcttgaagaggaggccgcctcctnggggctccaggctggcttgccngcgctctttcttccctcgtgacagtggtgtgtggtgtcgtctgtgaatgctaagtccatcacccttt

SEQ ID NO: 338 - DNA, 493 bp, Homo sapiens
  misc_feature (161)..(161): n is a, c, g, or t
  misc_feature (163)..(163): n is a, c, g, or t
  misc_feature (165)..(176): n is a, c, g, or t
tattgtcatctgatatacacataaaacaactcacattgttggagttaactaattatccccatttcatggttttcagtggcaacttactgacccttgtttttgcctgtgcttgtatgcatgcattttcaagcaagtaataaagcagcctcatttaattctgnanannnnnnnnnnnnacatatagactgaatgctataatcaaatctattgacagtatctgcagttctttcagaattccagggcaaataatataacgacctgatatctttctacaggaatattttcagacattatatagcacattactgatttaatgcttttacttttatctttcaaaacaaattcactaaaaattaacagctatgattctgaagtcacctttctcaaaccttgaaaatgagctctaggatctctataaacatttctaacacttttcctgtagttaccatagacagacatctgtcgttagacctgtgtggtatttcaaagaact

SEQ ID NO: 339 - DNA, 463 bp, Homo sapiens
  misc_feature (61)..(61): n is a, c, g, or t
tttgcacttccttcggagagcatctaagattggagaggttgatgtcgagcaacatactttngccaaatacctgatggaactaactatgttggactatgacatggtgcactttcctccttctcaaattgcagcaggagctttttgcttagcactgaaaattctggataatggtgaatggacaccaactctacaacattacctgtcatatactgaagaatctcttcttccagttatgcagcacctggctaagaatgtagtcatggtaaatcaaggacttacaaagcacatgactgtcaagaacaagtatgccacatcgaagcatgctaagatcagcactctaccacagctgaattctgcactagttcaagatttagccaaggctgtggcaaaggtgtaacttgtaaacttgagttggagtactatatttacaaataaaattggcaccatgtgccatctgtacata

SEQ ID NO: 340 - DNA, 262 bp, Homo sapiens
taagtgtgaagaatgcgagaagagcttcaaacagcgctctgacctctttaaacaccacagaatccacactggggagaagccctatggatgttccgtctgtgggaaacgcttcaatcagagtgcaaccctcattaaacaccagagaattcacactggggaaaagccttacaaatgtcttgaatgtggggaaagatttagacaaagtacacaccttatccgacaccaaagaattcatcaaaataaagtgctgtcggctgggcgt

SEQ ID NO: 341 - DNA, 459 bp, Homo sapiens
  misc_feature (181)..(181): n is a, c, g, or t
  misc_feature (287)..(287): n is a, c, g, or t
  misc_feature (316)..(319): n is a, c, g, or t
  misc_feature (324)..(325): n is a, c, g, or t
  misc_feature (328)..(330): n is a, c, g, or t
  misc_feature (362)..(362): n is a, c, g, or t
  misc_feature (375)..(375): n is a, c, g, or t
  misc_feature (381)..(381): n is a, c, g, or t
  misc_feature (386)..(386): n is a, c, g, or t
  misc_feature (397)..(397): n is a, c, g, or t
  misc_feature (403)..(403): n is a, c, g, or t
  misc_feature (408)..(408): n is a, c, g, or t
  misc_feature (411)..(411): n is a, c, g, or t
  misc_feature (418)..(418): n is a, c, g, or t
  misc_feature (420)..(420): n is a, c, g, or t
  misc_feature (430)..(430): n is a, c, g, or t
tattcatgaattcttgcacattatgaagaaagagtccatgtggtcagtgtcttacccggtgtagggtaaatgcacctgatagcaataacttaagcacacctttataatgaccctatatggcagatgctcctgaatgtgtgtttcgagctagaaaatccgggagtggccaatcggagattcngtttcttatctataatagacatctgagcccctggcccatcccatgaaacccaggctgtagagaggattgaggccttaagttttgggttaaatgacagttgccaggngtcgctcattagggaaaggggttaagtgnnnntgctnnatnnnctgcatgatgtttgcaggcagttgtggttttnctgcccagcctgncaccancgggnccatgcggatntgttgntccanccnaacaccncnggaccatttntgtatgtaagacaattctatccagcccgc

SEQ ID NO: 342 - DNA, 492 bp, Homo sapiens
  misc_feature (254)..(254): n is a, c, g, or t
  misc_feature (315)..(315): n is a, c, g, or t
  misc_feature (388)..(388): n is a, c, g, or t
tggggctgagcaaggcctacgtaggccagaagagcagcttcacagtagactgcagcaaagcaggcaacaacatgctgctggtgggggttcatggcccaaggaccccctgcgaggagatcctggtgaagcacgtgggcagccggctctacagcgtgtcctacctgctcaaggacaagggggagtacacactggtggtcaaatggggggacgagcacatcccaggcagcccctaccgcgttgtggtgccctgagtntggggcccgtgccagccggcagcccccaagcctgccccgctacccaagcagccccgccctnttcccctcaaccccggcccaggccgccctggccgcccgcctgtcactgcagccgcccctgccctgtgccgtgntgcgctcacctgcctccccagccagccgctgacctctcggctttcacttgggcagagggagccatttggtggcgctgcttgtcttctttggttctgggaggggt

SEQ ID NO: 343 - DNA, 333 bp, Homo sapiens
  misc_feature (274)..(274): n is a, c, g, or t
  misc_feature (299)..(299): n is a, c, g, or t
gaagtcagctgggcattcaaagaagctagactgagaacgcctgagaagaaccagctacgggaagagctttgggaagcaaaggcagaggccctggggtgggagcaggcttgttttattggaaggaccagaaaactggtaagtgtgacccagatcaagtgtgaggagatgaggctggggatagtcaggggctggatcacccagggccttgtgggccccacatagggttttgggttttattctcagggcaatgggaagctgttggatggtttgatgnaaggggagtgacaggatccgatgtncctatttaagaatttaagagggtcgggtgcggtg

SEQ ID NO: 344 - DNA, 514 bp, Homo sapiens
  misc_feature (41)..(41): n is a, c, g, or t
  misc_feature (43)..(43): n is a, c, g, or t
  misc_feature (68)..(68): n is a, c, g, or t
  misc_feature (91)..(91): n is a, c, g, or t
  misc_feature (97)..(97): n is a, c, g, or t
  misc_feature (103)..(103): n is a, c, g, or t
  misc_feature (109)..(109): n is a, c, g, or t
  misc_feature (133)..(133): n is a, c, g, or t
  misc_feature (138)..(138): n is a, c, g, or t
  misc_feature (150)..(150): n is a, c, g, or t
  misc_feature (158)..(158): n is a, c, g, or t
  misc_feature (170)..(170): n is a, c, g, or t
  misc_feature (316)..(316): n is a, c, g, or t
  misc_feature (411)..(411): n is a, c, g, or t
  misc_feature (481)..(481): n is a, c, g, or t
gaaacgtttgcaacatgatcaaggtgttagttctccaccananaagttgtattcttcttttgccaccncaaaccatcacagagtctttaantgcaantcaatnggtcantgctagtcaaagctatgttcttanaaaanccccagacagcntcagagcntcagaaaatccntgtggagtggctgctctgtaccgtgggcatccggcagccaggaagtgagacaacataattataactttgttttatgatgctgcatcatttgtactgtttaggtcgacgtgaggacatcatcttatttagaattttccgtttggcantctcttttgggtgggagttatgctgggggttgtaaataatgacaaggctgagatttttatgatgtttaaattgggcacaatgattttgaccttantccccaaacttcttttcttttctactgtttaacatacacaggctatttatacacgtccccagctcccatntgaaacctgtgactcaggtttatgaatggtgtt

SEQ ID NO: 345 - DNA, 387 bp, Homo sapiens
  misc_feature (289)..(289): n is a, c, g, or t
  misc_feature (302)..(302): n is a, c, g, or t
  misc_feature (309)..(309): n is a, c, g, or t
  misc_feature (318)..(318): n is a, c, g, or t
  misc_feature (324)..(324): n is a, c, g, or t
  misc_feature (357)..(357): n is a, c, g, or t
  misc_feature (359)..(359): n is a, c, g, or t
gagacgtaggtagccgtagttggacggacgggcagggccggcggggcagccccctccgcgcccccggccgtcccccctcatcgccccgcgcccacccccatcgcccctgcccccggcggcggcctcgcgtgcgagggggctcccttcacctcggtgcctcagttcccccagctgtaagacagggacggggcggcccagtggctgagaggagccggctgtggagccccgcccgccccccaccctctaggtggcccccgtccgaggaggatcgttttctaagtgcaatacnttggcccgccggnttcccgntgcccccantcgcgntcacgcaataaccggcccggcccccgtccgcgngngtcccccggtgacctcggggagcagcac

SEQ ID NO: 346 - DNA, 550 bp, Homo sapiens
ctccttgcccctattgtgtagcagaaaccccactttcccttggatattggggttaaccatcctgacagtgcagtgatctctttctctgccaatatttcaacataaggagccccagatggcacaagatcatcttccaatttaacagacccataactatattccctggtggaagcagttcctcttggtcactagagatttccaaacccacaaaacctaaggtttcttggttaaaggccatgtttgtgggatatgctgagatgaatatgctgtggtttgaatgtgtcccccaaagttcatatgttggaaacttgattcccattgcaacagtgttgagatctggggcccaatgagaggtgattaggccatgagggcggagtgaatggattaatgcagttatctcaagagtgggtttgttatgaagggggtgtttggtcctcttttctctcttgcccatgtgattccttccaccatgtttatgatgcaacaagaaggtcctcaccagatgctggttccttgatcttgtattttgcagcctccaaaatcgtgagcc

SEQ ID NO: 347 - DNA, 535 bp, Homo sapiens
  misc_feature (256)..(256): n is a, c, g, or t
  misc_feature (502)..(502): n is a, c, g, or t
tagagatcatctagtcccatcaactcactatatatatgaggaacctgaggtccagagtggggaagtgtcttacccaaggtcacatggtttcagagaaattatgttgaatccaataagccttcccggacattccaagcctcttaaccatggcatctatgttgaggatgtcaatgtttatttcagcaaaggacgtcatggcttttaaaaactccttttaagcctccttgttttgatgtcaccttggtaggctgggccntctgagaggttggaagctctaggcattgttctctttggatccagggatgctaagtagaaactgcatgagccaccagtgccccggcaccctttaacaccaccagatgggtgttttcccccatccaccactggcagggttgccccttccctccaatcatcactgtgctccttttttcccggcctacgaggcagctcctgccactatctttagagccaataaagagaattaaaaacctgtgcaccaggnagcatcttttaaatacactagccattctcttgc

SEQ ID NO: 348 - DNA, 517 bp, Homo sapiens
  misc_feature (210)..(210): n is a, c, g, or t
  misc_feature (481)..(481): n is a, c, g, or t
ttcgctggatgcctcctgaaagcatcatgtaccggaagttcactacagagagtgatgtatggagcttcggggtgatcctctgggagatcttcacctatggaaagcagccatggttccaactctcaaacacggaggtcattgagtgcattacccaaggtcgtgttttggagcggccccgagtctgccccaaagaggtgtacgatgtcatgntggggtgctggcagagggaaccacagcagcggttgaacatcaaggagatctacaaaatcctccatgctttggggaaggccaccccaatctacctggacattcttggctagtggtggctggtggtcatgaattcatactctgttgcctcctctctccctgcctcacatctcccttccacctcacaactccttccatccttgactgaagcgaacatcttcatataaactcaagtgcctgctacacatacaacactgaaaaaaggaaaaaaaanaaagaaaaaaaaaccctgtaaggcagtttggcaaat

SEQ ID NO: 349 - DNA, 459 bp, Homo sapiens
  misc_feature (83)..(83): n is a, c, g, or t
  misc_feature (298)..(298): n is a, c, g, or t
ggacaaacagcctctgcaatacttgaggagcttgttagaaacccaaactcacagccccctccagacctacgtacagaatgtanattagcaagattcgctaggtggtttatgtgcacgttaaagtttaagaagcactgcctgagaatcccttggtcctaattaattcttttccacactcagatttgctaatgggtttcaccttatctcttgactcttgtttgatggcaacaggaaatagtagcatttcaggaagggtggaaaatataaaaagcactcccaacccaagcctccaaaaaancagcaattttcattttgtgtccatatattcccttctaatcattgtcctcatgcaagattttttttcataaagatgatctgctacataattttatatcatactctttctcctaacattacatcacaagtatactttcatgttgctgctacattcttcacact

SEQ ID NO: 350 - DNA, 485 bp, Homo sapiens
  misc_feature (33)..(34): n is a, c, g, or t
  misc_feature (88)..(88): n is a, c, g, or t
  misc_feature (288)..(288): n is a, c, g, or t
  misc_feature (349)..(349): n is a, c, g, or t
  misc_feature (380)..(380): n is a, c, g, or t
tttattcttattcccgtatctttgagagaggannagagtgggattgctacccacattttaatgaaggtggagctgagccgtagaactntctgggagccatccaacctggctgtggctcataacaaggtattgatcacttcctttggcctgagtgagtccagggtgcctagacaagaggtagcagcctgtggatgtccagcacctttgcagggaatacagggcccaatctggcacatgccccttttcctccaggcccagagcaggggctgttgccgaaaggctgtggancaacaagttgacatctgacctgacatttgcctatgaacgtttgtcacacttccgctgtganttgctgaggtaagcaagctgtggggccttcncaaggcggagcaggccagatccagggctggggaaccccttagagagaggaagacaataattaacaatagctaacacttacagaggcttatagtcagccctcatcc

SEQ ID NO: 351 - DNA, 553 bp, Homo sapiens
agtgttcttctctctggcaaagatttgtgtactgttgggggaagattcatgttatttctcaggtagactttactttttgagattctgtgtgtgtgtgtgtgtgtgtgtgtgtgtgtatgtgtgtgtgtgtgtgtattttgcctggtggggggttaaaggcagatagaatgtagttgtttatgagtttatactttctctttagcataatagatgccctgtttattttctcagaatgtgacaataaaattaggaaaggagaggaattcagaggcccatgttgcagttcatggcaaagttttacccaaatatttccttcagaaacatttagtcatagcaagccatataaattattgtctgcaactggtatcagaaaaagaaatcagtaggtggggactgtagaccccaatggtgcatctgtttacaatctttcttttccaaggttttaaggttcatgaataacatgagggaattttgggagagctaccacatcagtactttggcacgcattaactgttccacaggaaaactagggttgcttcagggctatttttgt

SEQ ID NO: 352 - DNA, 447 bp, Homo sapiens
  misc_feature (186)..(186): n is a, c, g, or t
  misc_feature (193)..(193): n is a, c, g, or t
  misc_feature (297)..(297): n is a, c, g, or t
  misc_feature (319)..(319): n is a, c, g, or t
gccttttgggagtgcgtggtggtggtctgggtgtatggagctgaccgcttcacggacgacattgcctgtatgatcgggtaccgaccttgcccctggatgaaatggtgctggtccttcttcaccccgctggtttgcatgggcatcttcatcttcaacgttgtgtactacaagccgctggtctacaanaacaccnacgtgtacccgtggtggggtgaggccatgggctgggccttcgtgctgtcctccatgctgtgcatgccactgcacctcctgggctgcctcctcagggccaagggnaccatggctgagtgctggaagnacctgacccagcccatctggggcctccaccacttggagtaccgagctcaggatgcagatgtcaggggcctgaccaccctgaccccagtgtccgagagcagcaaggtcgtcgtggtggagagtgtcatg

SEQ ID NO: 353 - DNA, 538 bp, Homo sapiens
gccagctttgggctgagctaacaggaccaatggattaaactggcatttcagtccaaggaagctcgaagcaggtttaggaccaggtccccttgagaggtcagaggggcctctgtgggtgctgggtactccagaggtgccactggtggaagggtcagcggagccccagtgcctccttgtgcatagaccttcttctcccacccccttctgcccctgggtccccggccatccagcggggctgccagagaaccccagacctgcccttacagtagtgtagcgccccctccctctttcggctggtgtagaatagccagtagtgtagtgcggtgtgcttttacgtgatggcgggtgggcagcgggcggcgggctccgcgcagccgtctgtccttgatctgcccgcggcggcccgtgttgtgttttgtgctgtgtccacgcgctaaggcgaccccctcccccgtactgacttctcctataagcgcttctcttcgcatagtcacgtagctcccaccccaccctcttcctgtgtctcacgcaagtttta

SEQ ID NO: 354 - DNA, 556 bp, Homo sapiens
  misc_feature (27)..(27): n is a, c, g, or t
  misc_feature (74)..(74): n is a, c, g, or t
  misc_feature (91)..(91): n is a, c, g, or t
  misc_feature (100)..(100): n is a, c, g, or t
  misc_feature (109)..(109): n is a, c, g, or t
  misc_feature (112)..(112): n is a, c, g, or t
  misc_feature (121)..(121): n is a, c, g, or t
  misc_feature (138)..(138): n is a, c, g, or t
  misc_feature (155)..(155): n is a, c, g, or t
  misc_feature (162)..(162): n is a, c, g, or t
  misc_feature (169)..(169): n is a, c, g, or t
  misc_feature (181)..(182): n is a, c, g, or t
  misc_feature (184)..(184): n is a, c, g, or t
  misc_feature (186)..(186): n is a, c, g, or t
gttgacgacaagttctacagcaagctngatcaagaggatgcgctcctgggctcctaccctgtagatgacggctnccgcatccacgtcattnaccacagtngcgcccgcnttngtgagtatnaggacgtgtcccgggtngagaagtacacgatctncacaagnaagcctnacgaccagaggnnangnacgggcaggtgggcgtcgagggacacggtccgctctttcctgaagcgcagcaagctcggccggtacaacgaggaggagcgggctcagcaggaggccgaggccgcccagcgcctggccgaggagaaggcccaggccagctccatccccgtgggcagccgctgtgaggtgcgggcggcgggacaatcccctcgccggggcaccgtcatgtatgtaggtctcacagatttcaagcctggctactggattggtgtccgctatgatgagccactggggaaaaatgatggcagtgtgaatgggaaacgctacttcgaatgccaggccaagtatggcgcctttgtcaagccagcagtcgtgacggtgggggacttcc

SEQ ID NO: 355 - DNA, 497 bp, Homo sapiens
cgctctgcctcacggaaagacagatcaagatttggtttcagaaccggcgcatgaagtggaaaaacgagaacaagaccgcggccccggccaccaccggccaagacagggctgaagcagaggaggaagaggaagagtgaccgatggagaaagggcacaggaagagacatgagaagggagacgaagacaagcagctctgggaactgaatcaggaaactcaaatcgaatagggaactaaaaaacaaaacaaaaaacaaaaaaaaacaaaaaaaaaccctatttaaatgaaacgagtttaaaaacattttttaaggagggaggtttggtttttttgtacaatatgaaaaggacattatctacctgttctgtagctttctggaatttacctccccttttctatgttgctattgtaaggtctttgtaaaatcttgcagttttgtaagccctctttaatgctgtctttgtggactgtgggtctggactaaccctgtggttgcctg

SEQ ID NO: 356 - DNA, 533 bp, Homo sapiens
attacaggctctttaatccatctggaaatgatttttgtatatggtgtgaggtgggaggacacaccatgctccccattcgctggatgcctcctgaaagcatcatgtaccggaagttcactacagagagtgatgtatggagcttcggggtgatcctctgggagatcttcacctatggaaagcagccatggttccaactctcaaacacggaggtcattgagtgcattacccaaggtcgtgttttggagcggccccgagtctgccccaaagaggtgtacgatgtcatgctggggtgctggcagagggaaccacagcagcggttgaacatcaaggagatctacaaaatcctccatgctttggggaaggccaccccaatctacctggacattcttggctagtggtggctggtggtcatgaattcatactctgttgcctcctctctccctgcctcacatctcccttccacctcacaactccttccatccttgactgaagcgaacatcttcatataaactcaagtgcctgctacacataca

SEQ ID NO: 357 - DNA, 534 bp, Homo sapiens
gtatcattttctaggtaaggatgctaatctgtctccaagccaaataacacacagtaaatcatggcaccaggatttgaatctgggtctttatacatcatagcccatgctgttctcactgtattttgctttttccaagtataaccccgttttcacacgaatggccccttcacatatttgaagactaccgtcgtgtccgtgctgaccctttctccctgccacacatggctggagtgcaatggcgcgatctcggctcactgcaacctctgtctcccaggttcaggaaaatggctttgtaaagaagcttgagcctaaatctggctggatgacttttctagaagttacaggaaagatctgtgaaatgctcttctgtcctgaagcaatactgttgaccagaaaggacactccatattgtgaaaccggcctaatttttctgactcttacgaaaacgattgccaacacatacttctacttttaaataaacaactttgatgatgtaacttgaccttccagagttacagaaattttgtccctatt

SEQ ID NO: 358 - DNA, 260 bp, Homo sapiens
cctgttccactgacatttcttagacattcagcaaaacccccaccttaacctcttttctttcttgagggttggtcctgtccccacctccaccctcccaccccctggaagaggaagggcccgggcatcagtggctagtccaaataaaatatgggcttggggatggaatgggtggtggtaagttcacagagtgtagttagatcccaactcccatgacctctggcttcagtggtgggtggggcagggcagatgaaagggcttca

SEQ ID NO: 359 - DNA, 399 bp, Homo sapiens
cgcccggaccagatacattccgtgtacatcacgcccggggcagacctgccagtgcagggcgccctggagcccctagaagaggatggccagccacctggggccaagcggaggtactcggatcccccaacgtactgcctgccccccgcctcgggccagaccaatggctgagagccacagctgacaaagtctgcatgtccgaggacggcccctgcactggagctgggcgccagagctgcagagctagtgttcggccctcagagaaggatccagaatcaaaagctcaagagtgacgtgaggtgggcaccggccccaagtgcagagtcaaggcagggagaggccggctggagccaggccccctcgcacgcagcccccaaatcatggacgcacctgtggggagca

SEQ ID NO: 360 - DNA, 458 bp, Homo sapiens
ttcgctggatgcctcctgaaagcatcatgtaccggaagttcactacagagagtgatgtatggagcttcggggtgatcctctgggagatcttcacctatggaaagcagccatggttccaactctcaaacacggaggtcattgagtgcattacccaaggtcgtgttttggagcggccccgagtctgccccaaagaggtgtacgatgtcatgctggggtgctggcagagggaaccacagcagcggttgaacatcaaggagatctacaaaatcctccatgctttggggaaggccaccccaatctacctggacattcttggctagtggtggctggtggtcatgaattcatactctgttgcctcctctctccctgcctcacatctcccttccacctcacaactccttccatccttgactgaagcgaacatcttcatataaactcaagtgcctgctacacataca

SEQ ID NO: 361 - DNA, 518 bp, Homo sapiens
gccaacgctaccaaggtctgtgggtcagatggagtcacatacggcaacgagtgtcagctgaagaccatcgcctgccgccagggcctgcgaggggctatcgagaggagctcactgtgggatggggttgacctctgccgcctgcctgggtatctgggcctggccatggctgtgttcttcatgtgttgattttatttgacccctggagtggtgggtctcatctttcccatctcgcctgagagcggctgagggctgcctcactgcaaatcctccccacggcgtcagtgaaagtcgtccttgtctcaggatgaccaggggccagccagtgtctgaccaaggtcaaggggcaggtgcagaggtggcagggatggctccgaagccagaaatgccttaaactgcaacgtcccgtcccttccccacccccatcccatccccacccccagccccagcccagtcctcctaggagcaggacccgatgaagcgggcggcggtggggctgggtgccgtgttactaactctag

SEQ ID NO: 362 - DNA, 560 bp, Homo sapiens
  misc_feature (76)..(76): n is a, c, g, or t
  misc_feature (153)..(153): n is a, c, g, or t
  misc_feature (236)..(236): n is a, c, g, or t
  misc_feature (238)..(238): n is a, c, g, or t
  misc_feature (245)..(245): n is a, c, g, or t
  misc_feature (249)..(249): n is a, c, g, or t
  misc_feature (426)..(426): n is a, c, g, or t
  misc_feature (446)..(446): n is a, c, g, or t
  misc_feature (451)..(451): n is a, c, g, or t
  misc_feature (487)..(487): n is a, c, g, or t
  misc_feature (490)..(490): n is a, c, g, or t
  misc_feature (502)..(502): n is a, c, g, or t
  misc_feature (525)..(525): n is a, c, g, or t
  misc_feature (528)..(528): n is a, c, g, or t
aggacctggtgacatgacataaactccaagacagaacctcagtttacagcacacgaaaaaaatatcttgccaacantgtaatgacaaaataaattcccgtgaagttccacaaccaggccgggcatggtggctcatgcctgtaatcccagcacnttgggaggtgaggtgggtggatcatctgaggtcaggagttcaagaccagcctggccaacatggagaaactccgtctctactananatacaanaatnaaccaggcttggtggtgtatgcctgtaatcccagctacttgggaggctgaggcaggagaatcgcttgatcccaggaaggcagaggtggcagtgagctgagaacgcacaactgcactccagcctgggtgacgagcaaaactccatctcaaaacaaaagttccacaaccagcctggagntgtgtagcccctttgtccanggaanttgactagtcaatcagtgacacctggtactggcagnttngggagtggcagnccaggatggacagcagtgggganggnaccatttggcataaggccgttgggcttcagga

SEQ ID NO: 363 - DNA, 390 bp, Homo sapiens
aagaatcagagctgctccttcctgtgaatcctaggtggccctatgtcttctgtggagttacagtataaagcagggagctaattaagagtattaaaacttaaaaccattttttgactctgattttaagtacatttttatatgtcagttgctgcccttcacactaccaggccctgcagccacagtgttctgttggagaaacttggggaagtgttttctgaaccagttctttttcttggggtagagcgtgaaatccagacctgtttttgaaaggacagcacaggaggagaaaagtgactgggacgatgcttcctctcatccaaaacacatgcagagtcacatcctcatcctagtgtttggcagtttgagaccgctaccctgaacttaagagct

SEQ ID NO: 364 - DNA, 532 bp, Homo sapiens
acccggtgtgttcttgtatagtcagtggcatcagcacccgtcagccggccttttccttcaggttcgtcaggctcaccggttctcactgtgtctgggaagtaggactgatggtcatcttcatgacaggcggcatctccactaagcctgtgtaactgttccctctttggttttcttagcttttgaatttgaagaagtacttttgaagactcccattttaagaaccgtgcagattttgctaccaaaagtcttcaccactgtgttcttaagtgaatgttaatttctgaggtttgggactttgtggtggtttttttcttcttttcttttccattcttctttctttctttttatgttgtttgctgtaaatgctgcacatccagattgcatatcaggacattggttattttatgctttcttggatataaccatgatcagagtgccatggccactaccccactgtttgctctcctgcaaatcaactgcttttaatttacacttaaacaaattgttttgagtgttagctactgcctttcta

SEQ ID NO: 365 - DNA, 471 bp, Homo sapiens
gcttctacgtcatcttcgacagagcccagaagagggtgggcttcgcagcgagcccctgtgcagaaattgcaggtgctgcagtgtctgaaatttccgggcctttctcaacagaggatgtagccagcaactgtgtccccgctcagtctttgagcgagcccattttgtggattgtgtcctatgcgctcatgagcgtctgtggagccatcctccttgtcttaatcgtcctgctgctgctgccgttccggtgtcagcgtcgcccccgtgaccctgaggtcgtcaatgatgagtcctctctggtcagacatcgctggaaatgaatagccaggcctgacctcaagcaaccatgaactcagctattaagaaaatcacatttccagggcagcagccgggatcgatggtggcgctttctcctgtgcccacccgtcttcaatctctgttctgctcccagatgccttctagattcactgtctt

SEQ ID NO: 366 - DNA, 505 bp, Homo sapiens
tggattggggcagtctttgtgcgttggcattggaggtgatccttttaatggaacagattttattgactgcctcgaaatctttttgaacgattctgccacagaaggcatcatattgattggtgaaattggtggtaatgcagaagagaatgctgcagaatttttgaagcaacataattcaggtccaaattccaagcctgtagtgtccttcattgctggtttaactgctcctcctgggagaagaatgggtcatgccggggcaattattgctggaggaaaaggtggagctaaagagaagatctctgcccttcagagtgcaggagttgtggtcagtatgtctcctgcacagctgggaaccacgatctacaaggaatttgaaaagaggaagatgctatgaaagaaaaaaaaaattcctaaaactgtggaatggatcacgtagacatgtaacccagcagcagtttgcttctgttgtccactgattaatcagcctatgtgcctgacactggtc

SEQ ID NO: 367 - DNA, 312 bp, Homo sapiens
gtgggagcacgaacgaggtgggagttctgtccccccatgcctggccctaaagtctcttgcacaccagctcgtcactgcctgccctacccacctctgtccagtctacacacccagcccaggcttaactcatgccaactccaccctacatggctgccctgtgccctcgggataaaccccaagcccctgagcttgtgtttaaagccgttggccttgctcccccagctttgtcagctcaggtctgtctacacccagatggtagcgcttgtgacactggcctggcagtcctgctcacagtgttctgtgcctgtgtgc

SEQ ID NO: 368 - DNA, 501 bp, Homo sapiens
gtgtccgaagttgagatggcctgccctactggcaaagaggtgacaggaaggctgggagcagctttgttaaattgtgttcagttctgttacacagtgcattgccctttgttgggggtatgcatgtatgaacacacatgcttgtcggaacgctttctcggcgtttgtcccttggctctcatctcccccattcctgtgcctactttgcctgagttcttctacccccgcagttgccagccagattgggagtctgtttgttccaatgggttgagctgtctttgtcgtggagatctggaactttgcacatgtcactactggggaggtgttcctgctctagcttccacgatgaggcgccctctttacctatcctctcaatcactactcttcttgaagcactattatttattcttccgctgtctgcctgcagcagtactactgtcaacatagtgtaaatggttctcaaaagcttaccagtgtggacttggtgttagccacgctgtttac

SEQ ID NO: 369 - DNA, 569 bp, Homo sapiens
cctgcgtgttgagtgtgtgggcggcagtgctttccggaggcctggtccatctggagttttgaggggtgaggggaccagagcagtgggaccagcatggggatcagcttcccttccccacctgggagccagggactgtccgggtagccagttttggtcctgccagctgcctccctgatccctccccactctcgccccttctctatgaacttaaaatcaaaaaaccacttccctcccatctcctccctgctcctgcgtggagggggaatgtgtgctggccagggtggaggactgagcacctgagcctggggctggctccccggggtccccgactcagctggtggctgtggagctgagtcccctccccgtaacctctgcaaggccagcacccaccatcactacctgcacctgctgtggtcccaccctctggaggcctgggaacctggctgcagcctgggaaggctggagaggcagacggtgggacccaccagctctctccccatcccgcttcttccctggggccaggccctacctgtgtggtggtgggtgggctgtcaagacgtgtcatgtac

SEQ ID NO: 370 - DNA, 459 bp, Homo sapiens
cagcatcgacgcacgcgagatcttcgatctgattcgctccatcaatgacccggagcatccactgacgctagaggagttgaacgtagtagagcaggtgcgggttcaggttagcgaccccgagagtacagtggctgtggctttcacaccaaccattccgcactgcagcatggccacccttattggtctgtccatcaaggtcaagcttctgcgctcccttcctcagcgtttcaagatggacgtgcacattactccggggacccatgcctcagagcatgcagtgaacaagcaacttgcagataaggagcgggtggcagctgccctggagaacacccacctcttggaggttgtgaatcagtgcctgtcagcccgctcctgagcctggcctttgacccctcagcctgcatactggtatcctggtcccagctcctgccagggctgttaccgttgttttcttgaatc

SEQ ID NO: 371 - DNA, 333 bp, Homo sapiens
tgcagccctgtctacactggataatcattccctggccatatcagtcatcatgatggttgtggctggcttcttcaccctctgtgccgtgctctcagtcttcctcctgcagcgggtgcactccctctaccgacggacaggggccagcttccagcaggcccaggaggagttttcccagggcatcttcagcagcagaaccttccacagagctgcttcatctgctgcccaaggagccttccaggggaattagtcctcctctcttctctccccctcagcctttctctcgcctgccttctgagctgcactttccgtgggtgccttatgtggtggtggttg

SEQ ID NO: 372 - DNA, 422 bp, Homo sapiens
gcgtgttctcctacgtgaaggtggcagccagctccctgctgcatggcgggggccggccggcattgctggcagccggcgtggccatccaggtgggctctctgctcggcgctgttgctatgttccccccgaccagcatctatcacgtgttccacagcagaaaggactgtgcagacccctgtgactcctgagcctgggcaggtggggaccccgctccccaacacctgtctttccctcaatgctgccaccatgcctgagtgcctgcagcccaggaggcccgcacaccggtacactcgtggacacctacacactccataggagatcctggctttccagggtgggcaagggcaaggagcaggcttggagccagggaccagtgggggctgtagggtaagcccctgagcctgggacctacatgtggtttg

SEQ ID NO: 373 - DNA, 439 bp, Homo sapiens
tctgactctagatgggacacttgacagtgacttgaaacatttgcatattcaggaatgcatgagatttcaagagagcctacagtatgaaatcattttcacaaaataagcagcttgcttctgaaatgctgtctttcccagtagctactcacctgcctctggtggctgggattcagatgccacaaaactgtcagtatctatagaccaggtctgtgccacctcctctctcctctgtgctcagtgaggaggcagtaaatgaagttacaggctagcacaatacctaactcatgtttcccagtacacctgtagatattactgtacttttatgttctcaagaaataagttgttgcctattcagtgttacagatttctttgtttctttttaattaaaatacaagaagcagctgaggaaagggagacaaggtattttatttctgactga

SEQ ID NO: 374 - DNA, 453 bp, Homo sapiens
aggctcaggcccatgaggtatggagacaccctggcccccaggagctggaggcaccgcccactcccctggcattccagctttgcaggtgaccctcctctacccaaagctctgtccccctgctcccactccagaagaactgcggcacgtgcttcgggcagcctagccacaggctttgagcgcctgcattcctgggggctggagggtggggtgccaaaggccctgagcaaaagccagagctcctctcatcaaagcctttacaaggtactgggcccagaggctttgccttgacagagtggcccagggtttcaagggaggaggaacctccccctacctaggacccttcctgtggggggtctacagagtcagggacagaagggaagggacccacaggaagtcacagtggtgcccagggatgtgtcagcccccagccacggggacgcgggattcaagaat

SEQ ID NO: 375 - DNA, 488 bp, Homo sapiens
ttaatcccatgcatgccaaacacttttcacacctaccgacccattctccttctgcttctcttgccctcttcttcacaccaaaatatgatcgtgtccctgccgcagaatatgtatttcctaattgctgtggccaagcgcctgtgtgccgaatcgcttgcttctgatcccgctccgtgtaacctaagtgcgctgcaggcaaagcccaggccacggctgcgtcactactgatgttcacgatgccacacagtcacacacctaattcattctcaagtcggagcaacacataccaaccttgaccttatcctcaagctccagggcagcctggccgagcagcccctgctccctcctggagacccttgtcacctcccgagctcctcctggagacccctgtcacctcctgaccaacctttcccagggcggcaccgatcaccgagcagccgtgcgtgtatctcaaggaactaaataagatgacgctactcctcatagca

SEQ ID NO: 376 - DNA, 485 bp, Homo sapiens
gacttgcctagatctttgttgtatcttggggacttttactttgttgtttgatgcttaaacttcaaaattctctgtattcaaatttgattgtggcgaatctacttcaaaaaggaaaaataatccaactttgtggatattaaatggaaggtttgctgttttgatctagttgtttccagtggagcagttttatgaaatatgttctataagatgtacattttttcattgtaacatagaaattgtaaataattgattaaagtgctgcattttgatgaattttttctagccatttttaaagagaaaactaggaattgagtattttgtgtacggtatgtttccatcctccctccccttcctcctcccctcctctctctctcttcctacctatttaattttcatttgtcatgaggtttttggatttgccaatgatctgctggacatcatgccccatgtcatagagaataaagctgatgattgtaccagtctta

SEQ ID NO: 377 - DNA, 569 bp, Homo sapiens
ggaaccatggacacagtttctctcagtgggactattccagttcaaatgcttttggaaattggtttggacaaactaaagaaagattatatcagttttttcataggtcaggaacttgcatctttgaatcatttggaatacttcattgctccatcagtagatatacaagaacaggtttatcgtgtccaaaaactccaccatattctagaaatattagtcagttgcatgcctttcattaaatctcaacatgaactcctcttttctttaacacagatctgcataaagtattacaaacaaaatcctcttgatgagcaacacatttttcagctgccagtcagaccaactgctgtaaagaacttatatcaaagtgagaagccacagaaatggagagtggaaatatatagtggtcaaaagaagattaagacagtttggcaactgagtgacagctcacccataggccatctgaattttcacaaacctgatttttcggaattaacactaagcggtagcctggaagaaaggatattctttactaacatggttacctgcagccaggtgcatttcaagtgaag

SEQ ID NO: 378 - DNA, 336 bp, Homo sapiens
tcctggttccctgagggtcctcagggtggaggacaggtttggcccagaaagactagccagaggcctgatggtcccaggtggctctggatatactttggatatggatttaaatggtctctaagagccgggggtagggggcaggaaaagtgggttgtctttgcccctcaaagtccacctacctagaaaccaagcccacggtcttggccgtgaccctgataataaatgggctctctcagaggcgccagcccctccctccccagccggaggcgtcatctctcttctgtaccactagagggagctctgatgcagctggagagcagcgctcaaggctctcgc

SEQ ID NO: 379 - DNA, 525 bp, Homo sapiens
agaccatccaacggcgactaaatgagattgaggctgccttgagggagctagaggccgagggcgtgaagctggagctggccttgaggcgccagagcagttccccagaacagcaaaagaaactatgggtaggacagctgctacagctcgttgacaagaaaaacagcctggtggctgaggaggccgagctcatgatcacggtgcaggaattgaatctggaggagaaacagtggcagctggaccaggagctacgaggctacatgaaccgggaagaaaacctaaagacagctgctgatcggcaggctgaggaccaggtcctgaggaagctggtggatttggtcaaccagagagatgccctcatccgcttccaggaggagcgcaggctcagcgagctggccttggggacaggggcccagggctagacgagggtgggccgtctgctttcgttcccacaaagaaagcacctcaccccagcacagtgccacccctgttcatctgggctgcctggcagagagccttgctgtttac

SEQ ID NO: 380 - DNA, 525 bp, Homo sapiens
cccggtgtggccacgagtcgggttgcactgctgtgatccatcctcatctcctaaagatgcatcctgacttatctccacacttgcacactgaagaatgcaacgtcttgattaacttgcttaaggaatgtcacaaaaatcacaacattctgaaattttttggttattgtaatgatgttgatcgggagttgagaaaatgcctgaagaatgagtacgtagaaaacaggaccaagagcagggagcatggcattgcaatgcgaaagaaactttttaatcctccagaggaatccgaaaaataaattgtattttcactcgatgccttggctgagagaagacctaaagactctgggttgatacctgaaagaatcctgtcttatttggtctccataatcctttgaatggaaagtgacctgtgagagattgaaccatggagaaatatgaaaaccctggattctgagtatttgttgggcagggcgtttagtactgtctcccctttaccagcaaacctgacttcaccatgtttattcc

SEQ ID NO: 381 - DNA, 520 bp, Homo sapiens
aaggatcttaactgtgttcgcattttttatccaagcacttagaaaacctacaatcctaattttgatgtccattgttaagaggtggtgatagatactatttttttttcatattgtatagcggttattagaaaagttggggattttcttgatctttattgctgcttaccattgaaacttaacccagctgtgttccccaactctgttctgcgcacgaaacagtatctgtttgaggcataatcttaagtggccacacacaatgttttctcttatgttatctggcagtaactgtaacttgaattacattagcacattctgcttagctaaaattgttaaaataaactttaataaacccatgtagccctctcatttgattgacagtattttagttatttttggcattcttaaagctgggcaatgtaatgatcagatctttgtttgtctgaacaggtatttttatacatgctttttgtaaaccaaaaacttttaaatttcttcaggttttctaacatgcttaccactg

SEQ ID NO: 382 - DNA, 261 bp, Homo sapiens
actcatctggcttcagcagattgccaccaagaggatacaggtggtcaggtcctggctggctttgtctttgggcctgggcaggcttaggatttgactttctttgaagtacctgatgctgattgattccactaatagtaggaagcaagagacttaactatgagggacgttatgtgaatcttaagtcttaccagtccttgcattagtacattaaatttggatgttttggaagcaaattcatacgatcgtgagtgatttctccaa

SEQ ID NO: 383 - DNA, 424 bp, Homo sapiens
caacacagactacaggttccgcgtatgtgcgtgtcgtcgctgtttagacacctctcaggagctaagcggagccttcagcccctctgcggcttttgtattacaacgaagtgaggtcatgcttacaggggacatggggagcttagatgatcccaaaatgaagagcatgatgcctactgatgaacagtttgcagccatcattgtgcttggctttgcaactttgtccattttatttgcctttatattacagtacttcttaatgaagtaaacccaacaaaactagaggtatgaattaatgctacacattttaatacacacatttattcagatactcccctttttaaagcccttttgttttttgatttatatactctgttttacagatttagctagaaaaaaaatgtcagtgttttggtgcacctttttg

SEQ ID NO: 384 - DNA, 460 bp, Homo sapiens
gcagcactcttaacttacgatctcttgacatacggtttctggctgagaggcctggcccgctaaggtgaaaaggggtgtggcaaaggagcctactccaagaatggaggctgtaggaatataacctcccaccctgcaaagggaatctcttgcctgctccatctcataggctaagtcagctgaatcccgatagtactaggtccccttccctccgcatcccgtcagctggaaaaggcctgtggcccagaggcttctccaaagggagggtgacatgctggcttttgtgcccaagctcaccagccctgcgccacctcactgcagtagtgcaccatctcactgcagtagcacgccctcctgggccgtctggcctgtggctaatggaggtgacggcactcccatgtgctgactccccccatccctgccacgctgtggccctgcctggctagtccctgcctgaataaag

SEQ ID NO: 385 - DNA, 434 bp, Homo sapiens
ttgttttcgagaacccagatccctctgatggttttgtcctcatccctgacctcaagtggaaccaacagcagctcgatgacttgtacttgatcgccatctgccatcgccggggcatcagatccctacgcgaccttactccggagcacttgccgctgctcaggaacatcctccaccaggggcaggaggccatcctgcagcgctaccggatgaagggagaccatctgcgagtatacctgcactacctgccctcctactaccacctgcatgtgcacttcaccgccctgggcttcgaggcccccggctcaggcgtggagcgggcccacctgctggctgaggtgatcgagaacttggagtgtgaccctaggcactaccagcagcgcacgctcaccttcgccctcagggctgacgaccccctgctcaagctcttgcaggag

SEQ ID NO: 386 - DNA, 416 bp, Homo sapiens
tgctggctggccatttacttccagcccttatgaggagtttcccctgctgaagagccctgcctgccccagatcatacccccttcctgcctgtaacccttaccggctccatatggggtacaaaggtctggcctcctcaccccaacttgggaaaccctctggggccatcccagctccagagccccttgtggggtcagtgagacctcattgtggccacattacagcccagtgcctctccctgacaagcctgtacccagccggctcagcccacagcactgtcctatgaaccttcctgcacgccattctccacctcagtatctgctttcggggaacccaacctgcgacagtgcttctgtgtgttttcagtcctgcaggtttgaactctgactttggagacttttccagttatctcgtggaat

SEQ ID NO: 387 - DNA, 477 bp, Homo sapiens
aattcctgtgcatgttctataatctgacaccctgaaagcaagtttcctttcgtcattcacatgctcttgttctgccgtgactgttcaggtgtatggtagtaagtaaatgtattaacatggtgaacagtagtaatattctatcatagagtattagcccttgcaagttttcagggcgtcttttccgacttcagtttttgtgataaagaatgtgaacagttgttagatgttctcagtgattcaactttaaaacaaatttctcgtgatgattcatttcaaaatcctgagtgagtctgactgaaaaatacgagagaaaagagagtggtttccgtttgcagctacacagctgtgtgcatcgacgttctcctggggtgtgtgccaagcgaaacccaggggtgaattggattcttgaagagaccaaagcctgtaactgtccagcttctaatttcaaaacgggtccattagggcttcgttgtgtta

SEQ ID NO: 388 - DNA, 548 bp, Homo sapiens
gactagtaaattgtctgcctcctatagcagaaaggtgaatgtacaaactgttggtggccctgaatccatctgaccagctgctggtatctgccaggactggcagttctgatttagttaggagagagccgctgataggttaggtctcatttggagtgttggtggaaaggaaactgaaggtaattgaatagaatacgcctgcatttaccagccccagcaacacaaagaatttttaatcacacggatctcaaattcacaaatgttaacatggataagtgatcatggtgtgcgagtggtcaattgagtagtacagtggaaactgttaaatgcataacctaattttcctgggactgccatattttcttttaactggaaatttttatgtgagttttccttttggtgcatggaactgtggttgccaaggtatttaaaagggctttcctgcctccttctctttgatttatttaatttgatttgggctataaaatatcatttttcaggtttattcttttagcaggtgtagttaaacgacctccactgaactgggtttg

SEQ ID NO: 389 - DNA, 492 bp, Homo sapiens
tgtatggttttcacctggacaccgtgtagaatgcttgattacttgtactcttcttatgctaatatgctctgggctggagaaatgaaatcctcaagccatcaggatttgctatttaagtggcttgacaactgggccaccaaagaacttgaacttcaccttttaggatttgagctgttctggaacacattgctgcactttggaaagtcaaaatcaagtgccagtggcgccctttccatagagaatttgcccagctttgctttaaaagatgtcttgttttttatatacacataatcaataggtccaatctgctctcaaggccttggtcctggtgggattccttcaccaattactttaattaaaaatggctgcaactgtaagaacccttgtctgatatatttgcaactatgctcccatttacaaatgtaccttctaatgctcagttgccaggttccaatgcaaaggtggcgtggactccctttgtgtgggtggggt

SEQ ID NO: 390 - DNA, 354 bp, Homo sapiens
gaatcatttcattcactttgggagaggcctataattacatttatttgcaatgtttctcttcgctagattgttacatagctcccattctgttggttttgcttacagcatatggtaaccaaggttagatgccagttaaaattccttagaaattggatgagccttgagattgcttcttaactgggacatgacatttttctagctcttatcaagaataacaacttccacttttttttaaactgcacttttgactttttttatggtataaaaacaataatttataaacataaaagctcattgtgttttttagacttttgatattatttgatactgtacaaactttattaaatcaagatg

SEQ ID NO: 391 - DNA, 537 bp, Homo sapiens
gagccctagatgttcctggaagttggccccctttatgaaaaccacttcccacagccagtgggaactgccagaggaagatctggcgtcacatggctcccaggaaagtgctgtgccctatccccactgataccatctgattccccgatgcctgtgcctgttccacctggacggtggccccctcagcctggcagcctctggacagagaggaaggaaggattggaaaagtccccgcagcacagcgacggtgggaagatgccttacgtctgatcttgatgggggcactggcctggagcctgggcccacctgcttctggggggttggggagcaggccagatggaggtggtggtgccaggaagaaatggagcgatgactgactgtggggtgggcccaggatttccacatcttggtgaagttgcccctgggaagggcagctgggggcagtggcgccagttcccttccatggtctcccggctggcaatgtggtgaagctgagtttctgtccaatgagcaggaagattctgagacatttcgcctgag

SEQ ID NO: 392 - DNA, 258 bp, Homo sapiens
tggaccccgagctgttgaggtacttgctgggacggattcttgcgggaagcgcggactccgagggggtggcagccccgcgccgcctccgccgtgccgccgaccacgatgtgggctctgagctgccccctgagggcgtgctgggggcgctgctgcgtgtgaaacgcctagagaccccggcgccccaggtgcctgcacgccgcctcttgccaccctgagcactgcccggatcccgtgcaccctgggacccagaagtgcccc

SEQ ID NO: 393 - DNA, 513 bp, Homo sapiens
ttccataggccgatgctctgaaagaagagacgtggggctcgagagatttaaagattttatttttacaaatcacagctgatagacagcgaagccttccccatagagaccgtgctccaactcgggcctggggcactgctcgctgctcccaggaagggggtggcgtgacaggcaggaacctgcgaagtccagagtccagggtggagcgcaccagcctcagccagagcagccacgacagccacagtgtgtgcactcgatgatgcggccctgcaacggaggaggacagtgagacgatgccactgcgccacgctcgcccctgcacactcacatatgtggcaaccctcccacgaaggacctgccaccatgccatatagggacacacctcagaaacccttccttgacagctctggacagggaaaatttggctccctcatgaaggtagaaccagctgctgttgacaccgaggttacatctgtatgtctatttataatatgttctgcaaatccaacacacgtt

SEQ ID NO: 394 - DNA, 402 bp, Homo sapiens
gcacctcggagttgcagctgtgacactcataggttactcccaggagtgtgctgagcagaaggcaagctcttgctggatgaaacccctccaggtggggttggggagacttgatattcacatccaacagtttgaaaagggagagctcaattcccagcgtcaccccatggcttgtgttgcctgctacgcattgacttggatctccaggagtcccctgcacataccttctccatcgtgtcagctgtgtttctcttgattccgtgacacccggtttattagttcaaaagtgtgacaccttttctgggcaaggaacagcccctttaaggagcaaatcacttctgtcacagttattatggtaatatgaggcaatctgattagcttcacagactgagtctccacaacacc

SEQ ID NO: 395 - DNA, 518 bp, Homo sapiens
ggcggcgccagcgggaattaaatcgcagaaagtaccaggcactaggtcggcgctgccgggagatcgagcaggtgaacgagcgggtcctgaacaggctccatcaggtgcagaggataactcggaggctgcagcaggaacggaggttcctcatgagagtgctggactcctacggggatgactaccgggccagccagttcaccattgtgctggaggatgagggcagccagggcacggatgcccccaccccaggcaatgcggagaatgagcctccagagaaagagacactgtccccgcccagaaggactcctgcacccccagaacccggcagcccagcccccggtgaggggcccagtgggcggaagaggcggcgagtgccacgggatggacgccgagcaggaaatgcgctgactccagagctggccccggtgcagattaaggttgaggaagactttggctttgaagcagatgaggccctggattccagttgggtttctcggggtccagacaaactgctgccc

SEQ ID NO: 396 - DNA, 444 bp, Homo sapiens
cgacttccgaaggtcaccgggagcgggttctcagcctctcccaagccctggctactgaggcgtcgcagtggcacagaatgatgacaggtggaaatttggactcccagggagaccctcttcccggtgtgccgctgcctccttcggaccccacgcgccaggagacccctccccccagatctcccccggtggctaattcgggttccacggggttctctcgccgagggagtgggcgtggaggaggtcccaccccctgggggcccgcgtgggatgccgggatcgcccctccggtcctgccacaagacgagggggcatggcctctgcgagtcactctgctacaatccagcttgtaatccgcccaaaagcggcagccaatcggagcgcgaggacgtggtctggaggtaccgccgaagatctgggaccactcagggcatcagggggcgtggt

SEQ ID NO: 397 - DNA, 414 bp, Homo sapiens
ggtcctcctggtgagtcattggagctatgaaggggaaggggtcgtatcactttgtctctcctacccccactgccccgagtgtcgggcagcgatgtacatatggaggtggggtggacagggtgctgtgccccttcagagggagtgcagggcttggggtgggcctagtcctgctcctagggctgtgaatgttttcagggtggggggagggagatggagcctcctgtgtgtttggggggaagggtgggtggggcctcccacttggccccggggttcagtggtattttatacttgccttcttcctgtacagggctgggaaaggctgtgtgaggggagagaagggagagggtgggcctgctgtggacaatggcatactctcttccagccctaggaggagggctcctaacagtgtaactt

SEQ ID NO: 398 - DNA, 480 bp, Homo sapiens
tcaagctggaagatacctctctggccccggcacatgtcacccctgcactcctgccttcccgtgggcacttccacatcctctgggcctctggcagttcccagggactgttttcacctctgctgtctctggggtcagctgctgctcatcagctgcccgctagcatgtggccaggggtgcagggtggcggggggtcagcagcatgtccctgggcaggccctgggcaccctgtctcccctggtctcactgctgacctgggctggtcccagcctggattggcctcatccaggatctttggtcaccccacgctgccccatcttgcctgctgttccagttctggtcaagggccttgggggctggccccccaccaggccttctagagcagcaccagtctcagggccctgggaccagctgccctacttcccaggtttgtagccaggagaagggggcatcacagagctgatggtccaataaggggggtgt

SEQ ID NO: 399 - DNA, 533 bp, Homo sapiens
aggtgaagcgaagccactcttacctctcccttcccctcccacctgccccctgcgtaggcacccagacttggagagacccgtctgctgttaatacttccatcctcttccttcccaaagagcagatcccaaggcatttactccttgggtctgtctcgctttatctgtcgcccctcccagcgctgagagcctcccctggctgtcagcagcactgtgttccaggctcttgtctgaacaccgcagcccctccttcgctccttccagagctcagcatgtcacagcaaggactgccgcattggtgatggagggccagctgaggggaagttgctggtgagtttccttttctccatttctagcatatggacacctggcctctgcttgagcacttaggtgacaggaacttccgcacctcctgaggccctggatgattctaattgttagaaattctaattgttagaaatccttccttataatgaatgaattctgctttcctataatttctacctattgggccttgttctgttctctggaactaa

SEQ ID NO: 400 - DNA, 509 bp, Homo sapiens
cgctttgagctgcgcgaggacgggcgccccgagctgcccccgcaggcccacggtctcggcgtagacggtgcctgcaggccctgcagcgacgctgagctgctcctggccgcatgcaccagcgacttcgtaattcacgggatcatccatggggtcacccatgacgtggagctgcaggagtctgtcatcactgtggtggccgcccgtgtcctccgccagacaccgccgctgttccaggcggggcgatccggggaccaggggctgacctccattcgtaccccactgcgctgtggcgtccacccgggcccaggcaccttcctcttcatgggctggagccgctttggggaggcccggctgggctgtgccccacgattccaggagttccgccgtgcctacgaggctgcccgtgctgcccacctccacccctgcgaggtggcgctgcactgaggggctgggtgctggggaggggctggtaggagggagggtgggcccactgctttggaggtgatggg

SEQ ID NO: 401 - DNA, 481 bp, Homo sapiens
cagtggcttccagcagagttgacctgggatttctgtcatgggtgtccctctgtactcagaatgggttcaggccaagtcggtgaagatggatgttggcaaaataggaggataccctcatttgctgaatgggggacctgctctgagcctgcccaggggccaggcctgctccaggttaaactggacggaaggcccaggtctcagtttctttcaaccaggagaggccgctgcctagagcccctccccaccttttcctggatgggtgaggcaagccaggagagcaagcagtgttgtcctcacgggaggaggactgagcgactgggaaaactcggctctacatctcacccagaacggcttttagaaacaccacagctggagagtcctggctgagccttgggagtttcagctctttggcggggtgcccaggtgccatgcgatcagcgaagcctgcgagttggcaggactctgaggtttcctgcagacc

SEQ ID NO: 402 - DNA, 481 bp, Homo sapiens; identical to SEQ ID NO: 401

SEQ ID NO: 403 - DNA, 534 bp, Homo sapiens
agcatactatgcagcgttgggaactaggccacctattaatatggaagaactggatgaatcataccagaaagtaattgaactcttctctgtatgcactaatgaagaccctaaagatcgtccttctgctgcacacattgttgaagctctggaaacagatgtctagtgatcatctcagctgaagtgtggcttgcgtaaataactgtttattccaaaatatttacatagttactatcagtagttattagactctaaaattggcatatttgaggaccatagtttcttgttaacatatggataactatttctaatatgaaatatgcttatattggctataagcacttggaattgtactgggttttctgtaaagttttagaaactagctacataagtactttgatactgctcatgctgacttaaaacactagcagtaaaacgctgtaaactgtaacattaaattgaatgaccattacttttattaatgatctttcttaaatattctatattttaatggatctactgacattagcactttgt

SEQ ID NO: 404 - DNA, 213 bp, Homo sapiens
cgctggacgtggccagcgacagccagtcggagatgcaggagaagcaccccagcctgaacggcggcggggccctcaacggcccggggagctggggggcgctcatggggggcaagcgggaccccgaggactcggacgtgttcgaggaggacacgcacctgtgagcgcagcgaggcgcaggccgagtgggccgccaggaccaagcgaggtggaccc

SEQ ID NO: 405 - DNA, 406 bp, Homo sapiens
ccccagtgtccgagctggatcgtgcggacgcctggctcctccgaaaagcgcacgagacagccttcctctcctggttccgcaatggcctcctggcatcgggcatcggggtcatctccttcatgcagagtgacatgggtcgggaagcagcatatggcttcttcctgctgggcggcctgtgcgtggtgtggggcagcgcctcgtacgccgtgggcctggcggcgctgcgaggacccatgcagctgacgctggggggcgcggccgtgggcgcgggcgccgtgctggccgccagcctgctctgggcgtgcgccgtgggcctctacatggggcagctggagctggacgtggagctggtgcccgaggacgacgggacggcctccgcggaaggccctgatgaggcgggtcggcc

SEQ ID NO: 406 - DNA, 432 bp, Homo sapiens
ttggctgttccagcaggtggggcgctggcctcggtgagggcacagcagcaaggttcacggatatccgtgtgtcttgtctgtggccaccaggcacaggtttggcttccggtcagtgtcccgacactgtgcgggaggtgacaacagagcaaagcagcgcaggggtcagggaggtggagacactgctgaaatcacactaccccaccctcagctgaagccccacgttccacaaacttggggtcatagattgtccagtcactggctccctccctgtcagcacagcacagaggaaggggctaactgaatcttttaccacttctggcctggctccagaactttgttctagattccttaaaagtcggtagctgatgtcaaactcaattgagcagtagctttgatcccttggtctgggggtcgaaggaagatggcgctgtt

SEQ ID NO: 407 - DNA, 472 bp, Homo sapiens
gggaggaccggctaatactgtgaattcttgtgtcatcgtttggggttttacttgataccactagctataagcctaatctcataatgtatttcttttttgaaactgatttgtttagcattttgttttcagaagagccattctttattaagttttcatagaaaataatgttaaggtagatttagtttgaatgttttttcatatgaaaaagaggcttttattcttttccatagtttagacatcactggcgtcttctgagttttatgagacaggaaactaagtttactatctgtaaatgtaaacatatgtccattaagaaacatgtagtttttttttagaatgtaataacccagtggcttactgtttttcttaatctcttttaaaaaaactttagaagaatcttttaggaactaatatctcttgttctgaagaaacatttatctgacgttcagcagttcctacagttttacttcag

SEQ ID NO: 408 - DNA, 519 bp, Homo sapiens
gctgtggttgtggagttcagggacctgtggcggatccggagcccctgtggtgactgcgaaggcttcgacgtgcacatcatggacgacatgattaagcgtgccctggacttcagggagagcagggaagctgagccccacccgctgtgggagtacccatgccgcagcctctccgagccctggcagatcctgacctttgacttccagcagccggtgcccctgcagcccctgtgtgccgagggcaccgtggagctcagaaggcccgggcagagccacgcagcggtgctatggatggagtaccacctgaccccggagtgcacgctcagcactggcctcctggagcctgcagaccccgaggggggctgctgctggaacccccactgcaagcaggccgtctacttcttcagccctgccccagatcccagagcactgctgggtggcccacggactgtcagctatgcagtggagtttcaccccgacacaggcgacatcatcatggagttcaggcatgcagatacccca

SEQ ID NO: 409 - DNA, 469 bp, Homo sapiens
aggttgcaagaacattcctctactttctgctaagccttggaaacagttgggaaaagtagtttgaccctcacagttcacattcagctcagcagagcaagaccccagagatgcttagagacaggacacctggccatcaaacccagtttggcccagcctggttgggtgactttgtgggagccacttaacagctctgggtccctgttttaccatcctgggagcaaggccctgcagctccacgagacctttaccccgggaagaagccgccacccatgaaagcatttctgaagcccctttctaagacaaggctcagcatcttgatatttttgacagattcctcccaagtctggctctgggaggtatgtacccatctcaaatgttcccaagataaattcatccttcaggaaatggaaatgaacttgcttactaatgtgtgattcctagttgtagccaccggatgtgctgaggccta

SEQ ID NO: 410 - DNA, 495 bp, Homo sapiens
gtccagtcccagaccaatggaggccccagccccacacccaaggcccacccgccgcggagccccccgccccggccgcagcgcagctgctctctggacctgggagatgccgggtgctacggttatgccaggcgcctgggaggagcttgggcccgacggagccactctgtgcatggggggctgctcggggcagggtgccggggggtaggaggcagcgccgagcggctggaagagagtgtggtgtgatggacgggcagcttcctgtgtgctccaagggatgagcctcgtggggcagagggcccggggccgccgcctggcctgggagtccctccctggtttttattctcagtacctcaggctcccctgtgtacttggaggggcagggagccctttcctcggttctggcctccagaccagggtaagggcaggcccctccaacaggtgctcacagccaccgaggcaggggctgcagccacccactgggagtcttgtttttat

SEQ ID NO: 411 - DNA, 349 bp, Homo sapiens
aaacttgcgtttgagccgttgagctaattctgcaattttctaccaaacagagcgctggtggccccggagcagggctgtgacattggctggtggagcacccttcctgtgttctccctttgttccagcgccgcgatggtgagatcactgttccaagcagggggacggctcgcgataggacaaagagagcaggacctccagactctggggaccctgcagaccttgacaatttgcctgactcattcctgacctcttgtcattttggcctgaaggctacaaattcagggtcagctgtatgcactaagtcaaataatgaatttcttcctccctctcgcaaccgaccaaaattttg

SEQ ID NO: 412 - DNA, 562 bp, Homo sapiens
tcccggctacatgggagcgcggtgtgagttcccagtgcaccccgacggcgcaagcgccttgcccgcggccccgccgggcctcaggcccggggaccctcagcgctaccttttgcctccggctctgggactgctcgtggccgcgggcgtggccggcgctgcgctcttgctggtccacgtgcgccgccgtggccactcccaggatgctgggtctcgcttgctggctgggaccccggagccgtcagtccacgcactcccggatgcactcaacaacctaaggacgcaggagggttccggggatggtccgagctcgtccgtagattggaatcgccctgaagatgtagaccctcaagggatttatgtcatatctgctccttccatctacgctcgggaggtagcgacgccccttttccccccgctacacactgggcgcgctgggcagaggcagcacctgctttttccctacccttcctcgattctgtccgtgaaatgaattgggtagagtctctggaaggttttaagcccattttcagttctaacttactttcatcctattttgcatccc

SEQ ID NO: 413 - DNA, 458 bp, Homo sapiens
aacaatcctgaaggcctgggattttttgtctgaaaatcaactgcagactgtaaatttccgacagagaaaggaatctgtagttcagcacttgatccatctgtgtgaggaaaagcgtgcaagtatcagtgatgctgccctgttagacatcatttatatgcaatttcatcagcaccagaaagtttgggatgtttttcagatgagtaaaggaccaggtgaagatgttgacctttttgatatgaaacaatttaaaaattcgttcaagaaaattcttcagagagcattaaaaaatgtgacagtcagcttcagagaaactgaggagaatgcagtctggattcgaattgcctggggaacacagtacacaaagccaaaccagtacaaacctacctacgtggtgtactactcccagactccgtacgccttcacgtcctcctccatgctgaggcgcaatacaccgcttc

SEQ ID NO: 414 - DNA, 560 bp, Homo sapiens
agtatcccattggttctggtcgtgtgactttcaataaccaacggagttacctgaaagcagtcagcgctgcttttgtggagatcaaaaccaccaagttcacaaagaaggttcagattgacccctacctggaagattctctgtgtcatatctgcagttctcagcctggtcctttcttctgtcgagatcaggtctgcttcaaatacttctgccggagctgctggcactggcggcacagcatggagggcctgcgccaccacagccccctgatgcggaaccagaagaaccgagattccagctagaggagctggccttgcccagtggcctgtggcgcccaaagctggcaggtcaggcaagcagcctgcaccaccctgccactggcgaccagggagctggcttcccaaggacaagggaaaattgtagtcacctttgcacttgctgaatctgtctttgtttctgcactaattaatgcacattgagttttgtcaggttttgttttcagggggtgtaccaagggcaaggaccctctggcttaccctccaagcgactctgtagttttccca

SEQ ID NO: 415 - DNA, 443 bp, Homo sapiens
agaagtacaacatctccttccacaagcggtacggcaccaagatcatcaaacgccagcggaagaacgccacccaggaggccctgcgcaaaggggacgatgtcaaattcgaggagtttgtggcctatctcatcgacccacacacccagcgggaggagcctttcaacgaacactggcaaaccgtctactcactctgccatccctgccacatccactatgacctcgtgggcaagtacgagacactggaagaggattctaattacgtcctgcagctggcaggagtgggcagctacctgaagttccccacctatgcaaagtctacgagaactactgatgaaatgaccacagaattcttccagaacatcagctcagagcaccaaacgcagctgtacgaagtctacaaactcgattttttaatgttcaattactcagtgccaagctacctg

SEQ ID NO: 416 - DNA, 357 bp, Homo sapiens
gatcttcttggccatgaaaaccatgagatacagccgtatgtgaatggagctctgtacagcatcctttctgttccatccattcgtgaggaagcaagagcaatgggaatggaagacatcctacgctgcttcatcaaagaaggcaatgctgaaatgatccgccagatagaattcatcatcaagcagctaaattccgaagagctaccagatggtgttcttgaatctgatgatgatgaagatgaagatgatgaagaggaccatgacatcatggaagccgatctggacaaagacgaactgatccagccccagcttggagaactctcaggagagaagcttctgaccacagagtacctggggatc

SEQ ID NO: 417 - DNA, 487 bp, Homo sapiens
aacttattgaagagcgtcgccaacaattccttgcagacaaacaacgtgaactagaagagtggcagttgcagcaaaggcggcaaggatttattaatgcaattattgaagaagaaaggctaaaacttcttaaagagcatgctacaaacttactaggctatctccctaaaggagtatttaaaaaagaggatgatattgatctgcttggtgaagagttcaggaaagtatatcaacaaaggagtgaaatttgtgaagagaaatgatatcatcaaaattgggtaaagcatagattttttgtatgttaccactagatgtcagcataacttttgttttacagctcagtggcattaggtatccattgtctgtttggattttgtaaatcatcactgaatttcataacttgtaaacaattatcagatacaaattaattttaatcaagctgttatttttgtactgataatttcaaaatccgatttctacaacactacag

SEQ ID NO: 418 - DNA, 523 bp, Homo sapiens
gaatcggacatgtccaaaccaccgtgttacgaagaggcggtgctgatggcagagccgccgccgccctatagcgaggtgctcacggacacgcgcggcctctaccgcaagatcgtcacgcccttcctgagtcgccgcgacagcgcggagaagcaggagcagccgcctcccagctacaagccgctcttcctggaccggggctacacctcggcgctgcacctgcccagcgcccctcggcccgcgccgccctgcccagccctctgcctgcaggccgaccgtggccgccgggtcttccccagctggaccgactcagagctcagcagccgcgagcccctggagcacggagcttggcgtctgccggtctccatccccttgttcgggaggactacagccgtatagaggggcgcccggcgccccgggccccaccggcggactcctggcctgactgcggggctttttaaatgcttccctggactgcggggaggggcggggggagggagggatttcttatcccgtttgttacatt

SEQ ID NO: 419 - DNA, 506 bp, Homo sapiens
taatacccaactgactaactaaacaaatatcaacttgtaatactcaatgaatttttttgccatttacatttgaccgttggctttagtgaatgtccatatttaattttttaaggcaccattacacagtttatcctacatttatcacatttcttaaagtgttaagattctatggctcatttctatgtatttttcttactttacaaaataacctgaaacagtatagattttgtaacacttaatttgagcagcttttttattacattgaattatataaagtgcatgttaccttagaaaaattagtatttgctgctttactcttttgcaaaacatttgctgtaatgaatggatttgtatttccaatatgtatcttgactgcattttgtaatatttactgctttattcctaattctgctttaaagtactgaactgggcatgaaacattaaaatattaatccagaaactgtataaactggatgttgcttaaaatctgtatcactgccatgttg

SEQ ID NO: 420 - DNA, 504 bp, Homo sapiens
actgcggcctctgggatggagagcaatacatcatcatctttggagaatttagcgacggcgcctgtgaaccagatccaagaaacaatttctgataattgtgtggtgattttctcaaaaacatcctgttcttactgtacaatggcaaaaaagcttttccatgacatgaatgttaactataaagtggtggaactggacctgcttgaatatggaaaccagttccaagatgctctttacaaaatgactggtgaaagaactgttccaagaatatttgtcaatggtacttttattggaggtgcaactgacactcataggcttcacaaagaaggaaaattgctcccactagttcatcagtgttatttaaaaaaaagtaagaggaaagaatttcagtgatgtttatactaataagtttgctagtacagtgtcagttatttaaagtggtaatgcccgataatgtcttttaaatgtttgaggatgttttaaatacatgcattgtcttcacgaaga

SEQ ID NO: 421 - DNA, 472 bp, Homo sapiens
gactttgattggtagcatccacgccctccctgggctcataagccagaccatcaggcagcagcagagagatttcattgaggctcagatggagagctacgacaagcacgtcacttacaatgctgagcggtcccggtcctcgtccaggaggcggcggtcctcttccacagcaccaccaacttcatcagagagtagctagaagagaataagttaaccacaaaataagactttttgccatcatatggtcaatattttagcttttattgtaaagcccctatggttctaatcagcgttatccgggttctgatgtcagaatcctgggaacctgaacactaagttttaggccaaaatgagtgaaaactctttttttttctttcagatgcacagggaatgcacctattattgctatatagattgttcctcctgtaatttcactaactttttattcatgcacttcaaacaaactttactacta

SEQ ID NO: 422 - DNA, 475 bp, Homo sapiens
atatggccatcgtgtcagcagagagagtctctgtacacagccccgtgaaccctgaggagtggagtcatacacgaagggcgtgtggccatcgtgtcagcagagagagtctctgtacacagccccgtgaaccctgaggagtggagtcatacgcgaagggtgtgtggccaggctgcagagctgcgtgccgtttgtgtccgagcatcacgtgtggctccagcccttatttctgccagtgtagacacctctgtctgccccactgtcctggggtcgctcttgggaggcacaggcatgggtgtgtctggcctcattctgtatcagtccagtgtgttcctgtcatagtttgtgtctcccaggcaggccatggtaggggcctcgcaggggccattggggagcacagggccaggctggggtgaggagagctcccctgttttctgtttaattgatgagcctgggaaaggagtgtgttctgcctgcc

SEQ ID NO: 423 - DNA, 485 bp, Homo sapiens
actcacatccagtccgtttgtaaaatacacccaggatgagacctgcacgcaagtggctcacagcagcacgatttgtgacagcccgaggcggagaacaccgaacacccagtgaaggtgaggggatcagcacggcgcggccacccacgcacccacgcgctggaatgagactcagccacaaggaggtgcgaagctctgacccaggccacagtgcggatgcaccttgaggatgtcacgctcagtgagagacaccagacacagaagggtacgctgtgatcccacttctatgaaatgtccaggacagaccaatccacagaatcagggagaggattcgtgggtgccgggactggggagggggacctgggggtgactaggtgacataatggggacagggctgccttctgggtgatgagaatgttctggaatcagatgggatggctgcacggcgtggtgaaggtactgaacgccacctcactgtaagacggtag

SEQ ID NO: 424 - DNA, 538 bp, Homo sapiens
ttgtggagaacctggacagcctgccccccaaagttccacagcgggaggcctccctgggtcccccgggagcctccctgtctcagaccggtctaagcaagcggctggaaatgcaccactcctcttcctacggggttgactataagaggagctaccccacgaactcgctcacgagaagccaccaggccaccactctcaaaagaaacaacactaactcctccaattcctctcacctctccagaaaccagagctttggcaggggagacaacccgccgcccgccccgcagagggtggactccatccaggtgcacagctcccagccatctggccaggccgtgactgtctcgaggcagcccagcctcaacgcctacaactcactgacaaggtcggggctgaagcgtacgccctcgctaaagccggacgtaccccccaaaccatcctttgctcccctttccacatccatgaagcccaatgatgcgtgtacataatcccagggggagggggtcaggtgtcgaaccagcaggcaaggcgaggtgcccgc

SEQ ID NO: 425 - DNA, 381 bp, Homo sapiens
caaacggaacttgccgcgtcgaggactgtcgggctacagcatgctggccatagggattggaaccctgatctacgggcactggagcataatgaagtggaaccgtgagcgcaggcgcctacaaatcgaggacttcgaggctcgcatcgcgctgttgccactgttacaggcagaaaccgaccggaggaccttgcagatgcttcgggagaacctggaggaggaggccatcatcatgaaggacgtgcccgactggaaggtgggggagtctgtgttccacacaacccgctgggtgccccccttgatcggggagctgtacgggctgcgcaccacagaggaggctctccatgccagccacggcttcatgtggtacacgtaggccctgtg

SEQ ID NO: 426 - DNA, 457 bp, Homo sapiens
gaccaggaggaattcggtcttccagcaggggatgaagaacaagatcttgatatttggcctctttgaagagacagccctggctgctttcctttcctactgccctggaatgggtgttgctcttaggatgtatcccctcaaacctacctggtggttctgtgccttcccctactctcttctcatcttcgtatatgacgaagtcagaaaactcatcatcaggcgacgccctggcggctgggtggagaaggaaacctactattagccccccgtcctgcacgccgtggagcatcaggccacacactctgcatccgacacccaccccctctttgtgtacttcagtcttggagtttggaactctaccctggtaggaaagcaccgcagcatgtggggaagcaagacgtcctggaatgaagcatgtagctctatggggggaggggggagggctgcctgaaaaccatcc

SEQ ID NO: 427 - DNA, 478 bp, Homo sapiens
ttgcctcttacggggttcggcaggatggggaccctgctttcctctacttgctgtcagctcctcgagaagccccagccacaggacctagccctcagcacccccagaagatggacggggaacttggacgcttgtttcccccatcattggggctacccccaggcccccagccagctgcctccagcctgcccagtccactccagcccagctggtcctgtccttcctgcaccttcatcaatgccccagaccgccctggctgtgagatgtgtagcacccagaggccctgcacttgggacccccttgctgcagcttccacctagcagccaccagaggttacaaggggagagtggcccttccctcacaagtccgacatctccaggcccccactgaactccggggacctctactgactgcttgctgggacagtcaccagggttggggggaagggccacaaaatgaaaccattaaagacccttaagag

SEQ ID NO: 428 - DNA, 501 bp, Homo sapiens
acaggtgtgtgctaccacatcttgctagttttgtatttttagcagagatgggggtttcaccatgttggccaggctagtctcgaactcctgacctcaggtgatccacctgccttggcctcccaaagcactgggattacaagcatgagccactgtgcccagcctgttccactgacatttcttagacattcagcaaaacccccaccttaacctcttttctttcttgagggttggtcctgtccccacctccaccctcccaccccctggaagaggaagggcccgggcatcagtggctagtccaaataaaatatgggcttggggatggaatgggtggtggtaagttcacagagtgtagttagatcccaactcccatgacctctggcttcagtggtgggtggggcagggcagatgaaagggcttcagtgggaacctctgagagcattttcctgttccccctatcaaccgcccccagtgataacatctgtgaagccagccattactcaa

SEQ ID NO: 429 - DNA, 474 bp, Homo sapiens
tttcagctcagtgcccatgggcaaggatcatgatttccattccgtgttacaatgacaatatttaatgagcataaccttctcagtctcctgctctcaaatttaggacagagccgctaaggacaaaacaatccctcccgtgctttatgatggcagcaggggctggggagcctctgagggactctttcattctgcagttgtctggaagcctgggtggcgtcatgagctgaaggatcatgctttcctgtcctggctccataggttataggctggctggtgaaaggttcacgtggcccaggctgaacttcattgcctagctttggatgtgctttctgccataaagactgatttttgttcgttctgagccttcaaggaatttgttttttacaactggaatatgctcctgtgtgtgttaacagatcatggatgttttatgttttcactgatcatttaaagagtttgacctcagagctccag

SEQ ID NO: 430 - DNA, 316 bp, Homo sapiens
gggctcccaaagcgacaagatcgttagggagagaggcccagggtggggactgggaatttaaggagagctgggaacggatcccttaggttcaggaagcttctgtgcaagctgcgaggatggcttgggccgaagggttgctctgcccgccgcgctagctgtgagctgagcaaagccctgggctcacagcaccccaaaagcctgtggcttcagtcctgcgtctgcaccacccaatcaaaaggatcgttttgttttgtttttaaagaaaggtgagattggcttggttcttcatgagcacatttgatatagctctttttct

SEQ ID NO: 431 - DNA, 482 bp, Homo sapiens
taatttgagccacattcccaactctaactcagcacacactgccagtcttccccaatatctgtctcctctcaattccccaccacaccttataaaattgtaatcaaagatatctcactctgtcattgttaatctaagaataaaaacactgactttaatacggttttactaagtttcaaccttctaattaggtaggcctctaggtattctgcagatcactgctggtcttgatagccattaatatatgtttgtattatgttatttttcaactaaatcgcagttggaaaaaaaacatatttaatattatgcccttggatctgttactgcatcactagcacttgtgatgcaatagaacacttcgcctgtactgaaagggccaagagtaaatgccttgttttgtttttttgttttgttttgttttgctttttgttaaaacatgtctatagagttggcagttaatgctgaatttgtcaaataccccttcc

SEQ ID NO: 432 - DNA, 511 bp, Homo sapiens
  misc_feature (32)..(32): n is a, c, g, or t
  misc_feature (34)..(34): n is a, c, g, or t
  misc_feature (37)..(37): n is a, c, g, or t
  misc_feature (73)..(73): n is a, c, g, or t
  misc_feature (284)..(285): n is a, c, g, or t
gcatatagcaataaagacccccctccaccctngnaanccccatcccccaccgggcctttgtccctgccttggnttttctccccttctcattctcctctcccctttcctcactgaaggctgtgagttgctttcaatgtgacaacactatgatgtcatttggaaggatttgccaggacagactgattctgagtcctgggtgccgtatgtgtatgcggcagtgttgtcaggcgatcttgtttgaagctctatgttgccataattaccatcaagtacacactgttggnncaaaaggctaacacctgactttagaaaatgctgatttgagaacaaaaggaaaggtcttttttcactgcttaaagtggggtcactttgatacctttgcggtcatgtctgtgtctgatgagtgtagaatctctggatgtgcactgtcagtcatgtgtccaccaggcctcgaatatcatatgggaaatgtcatagttaaaaacgtacagccaggcccgtgtgctgttaa

SEQ ID NO: 433 - DNA, 445 bp, Homo sapiens
tggcctcttgatatacctcgagcttcccctgtgctccccagccccaggaccactggccccttggcctgaggggctgggggccccacgacctgcagcgtcgagtccgggagagagcccggagcggcgtgccatctcggctcggccttgctgagagcctccgccctggctttctccctgtctggtttcagtggctcacgttggtgctacacagctagaatagatatatttagagagagagatatttttaagacaaagcccacaattagctgtcctttaacaccgcagaaccccctcccagaagaagagcgatccctcggacggtccgggcgggcaccctcagccgggctctttgcagaagcagcaccgctgactgtgggcccggccctcagatgtgtacatatacggctatttcctattttactgttcttcagatttagtacttgta

SEQ ID NO: 434 - DNA, 443 bp, Homo sapiens
agcttgtctggtaagtggcttctctgtgaattgcctgtaacacatagtggcttctccgcccttgtaaggtgttcagtagagctaaataaatgtaatagccaaaccccactctgttggtagcaattggcagccctatttcagtttattttttcttctgttttcttcttttctttttttaaacagtaaaccttaacagatgcgttcagcagactggtttgcagtgaattttcatttctttccttatcacccccttgttgtaaaaagcccagcacttgaattgttattactttaaatgttctgtatttgtatctgtttttattagccaattagtgggattttatgccagttgttaaaatgagcattgatgtacccattttttaaaaaagcaagcacagcctttgcccaaaactgtcatcctaacgtttgtcattccagtttgagtt

SEQ ID NO: 435 - DNA, 536 bp, Homo sapiens
gacggcgtcaaggtcgtgggacgtgacacgaccgctgcggcgtcagctcagccttgcaagaccccaggcgcccgcgctgcacctgcgactgtcgccgccgccgtcgcagtcggaccaactgctggcagaatcttcgtccgcacggccccagctggagttgcacttgcggccgcaagccgccagggggcgccgcagagcgcgtgcgcgcaacggggaccactgtccgctcgggcccgggcgttgctgccgtctgcacacggtccgcgcgtcgctggaagacctgggctgggccgattgggtgctgtcgccacgggaggtgcaagtgaccatgtgcatcggcgcgtgcccgagccagttccgggcggcaaacatgcacgcgcagatcaagacgagcctgcaccgcctgaagcccgacacggtgccagcgccctgctgcgtgcccgccagctacaatcccatggtgctcattcaaaagaccgacaccggggtgtcgctccagacctatgatgacttgttagccaaagactgccactgca

SEQ ID NO: 436 - DNA, 464 bp, Homo sapiens
tatgaacttgcgtgggctactgcttgtagctttggtggttctcgaccgtttgtggtagcagtagatgacatcatgtttcagaaacctgttgaggttggctcattgctctttctttcttcacaggtatgctttactcagaataattatattcaagtcagagtacacagtgaagtggcctccctgcaggagaagcagcatacaaccaccaatgtctttcatttcacgttcatgtcggaaaaagaagtgccattggttttcccaaaaacatatggagagtccatgttgtacttagatgggcagcggcatttcaactccatgagtggcccagcgaccttgagaaaggactaccttgtggagccctaagaacaccacatttgttgaaaactagcactctacccacagtgacgtggtatctgatgaagacctgatcgagtgtattgattttagtattgcttcgtgtcctc

SEQ ID NO: 437 - DNA, 533 bp, Homo sapiens
gcgcagcatggaggactttgtcacttgggtggactcgtccaagatcaagcggcacgtgctagagtacaatgaggagcgcgatgacttcgatctggaagcctagcggatctcccactttgcatggctgtcttttacagatgggaaaactgaggcctgatgctggagattctatgagggtgctctcctcaagggtatcagacggtcgtaggttcttaagaatttgattcatcagtggcaggccatgcatagagccacgggaggtgcgtccttgttttccaggaaatgttcttagaacttggactactgattattaattgactgtgccttgggaaacagtgggaagtaacttggtgcagcactggggtattgttggactggttcaattcgtttaactcgaattcttgctcctggccgtggttaagctgtgtacagatgatggagagtttggcctcaagtttttataaactgagcgagactagtgttcaggatctcctcccttgtttaaatgtcaataaatgccccaactgctttgt

SEQ ID NO: 438 - DNA, 502 bp, Homo sapiens
cccgaggacgacgacgaggacgaggaggacacggtgactcggctgggccccgacgacacgctgccgggccccgagctgtccgcagagccggacgggcccctcaacgtcaacgtcttcacgtcggcggaggagctggagcgggcgcagcggctggaggagcgcgaacggatcctgcgggagatctggcgcaccgggcagccggacctgctgggcacaggcacgctggggcccagccccacggccacgggcaccctgggccgcatgcactattactgatgggccccggctcccgctgcaaggcgctcggggtaccggacctgcacatgagctcagagctaccccacaccttcggactgcctcggcccccacagctcccaggtgctactgggcgtggaccgccaccccctgagaggctcccttccccagtcctgccagaagaccccgggggcggggagggggcagcatgcagggtccccactccctctctggggtcgatgaagag

SEQ ID NO: 439 - DNA, 485 bp, Homo sapiens
ctccccctttgaaactcaagcacagctgcgaggagggcagcgaggagggacccctctctcatggttgtctctttcccccgctatgtcataggtagtggaggaagcgaaggaagtgaacgctgaatgtgacgcatttctgaagagctcagctgtcaccgggcatagcctggaagccccaagtctgttctgactttgcctggctgtctccttgacccgcctcctagatcattgtccttgatgtccaggctgggtcatttaaaatagagatgcaatcaggaaggttgggggacttgggactgtggctgaattgagaccttgctgatgtattcatgtcagcacctgagtcacagcccaggtgcccggaagcagcctcttcgcataggcagtgatttgcgattactttaaagctcaccttttttcttcccctctctgttcgctgctgtcagcataatgattgtgttccttccctatgggatccatctgtt

SEQ ID NO: 440 - DNA, 525 bp, Homo sapiens
cagcctagccttcaagtggtgtgagcggcctgagtggatacacgtggatagccggccctttgcctccctgagccgtgactcaggggctgccctgggcctgggcattgccttgcactctccctgctatgcccaggtgcgtcgggcacagctgggaaatggccagaagatagcctgccttgtgctggccatggggctgctgggccccctggactggctgggccacccccctcagatcagcctcttctacattttcaatttcctcaagtacaccctctggccatgcctagtcctggccctcgtgccctgggcagtgcacatgttcagtgcccaggaagcaccgcccatccactcttcctgacttcttgtgtgcctccctttcctttccctcccacaaagccaacactctgtgaccaccacactccaggaggcagccccatccccttccagcccctaagtaggccctcccctccctaaatctgcttccgcaccacctggtcttagccccaaagatgggccttctctctc

SEQ ID NO: 441 - DNA, 403 bp, Homo sapiens
cgcaagcccctgatgggcgcagaaaattcgggacagaccacgtagaggtgggctcccaagcaggtgcggacggcaccaggccgcccaaggcatcgctgccacctgagctccagccgcccacaaactgctgcatgagtggctgccccaactgcgtgtgggtggagtacgcggacaggctgctgcagcacttccaggacggtggggagcgggccctggctgccctggaggagcacgtggctgatgagaacctcaaggccttcctcaggatggagatccggctgcacaccaggtgcggaggctgagccatccctgctggactccctaccgcaggacggagtccaggacgcagccgcagcctccttccttcacaccccctcacagactccttgtgtccaacgggaat

SEQ ID NO: 442 - DNA, 346 bp, Homo sapiens
taggggggagatttgaccggcaggcttctgcggagggctgcttctacaacgctgactacctggcggcccgagcccggctggcaggtgaactggcaggccaggaagaggaggaagccctggaggggctggaggtgatggatgttttcctccggttctcagggctccacctctttcgggccgtagagccagggctggtgcagaagttctccctgcgagactgcagcccacggctcagtgaagaactctaccaccgctgccgcctcagcaacctggaggggctagggggccgtgcccagctggctatggctctctttgagcaggagcaggccaatagcacttagcccgc

SEQ ID NO: 443 - DNA, 378 bp, Homo sapiens
  misc_feature (146)..(146): n is a, c, g, or t
  misc_feature (220)..(220): n is a, c, g, or t
ggggagggcagaaagatcacacacaaggctgtcacttcatacttgcaggattgcacagcagccgggcagaggcgctcctcacttcccagatggggcggcgggcagcagagacgcacctcacttcctagacagtgcggcagccaggncacaggcacacctcacttcccagacagttgggcggccaggcaagcgctcctcacttcccagatggggcggctcncgggaagcggggctcctcacttcccagacagggtggccaggcagaggtgctcctcacttcccagaacaattctttatgaatttgataaaggactgaagtgcaactgaaagctgctagtgatgatctggtaatatacaatttgtccagtagccagtttg

SEQ ID NO: 444 - DNA, 556 bp, Homo sapiens
ctgtgcatggcacggctcaagacagtcctgaaatacgtgctgtttcttctgggtacactggtcatcgccatgtccttgcagctggaccgcaggggcatgtggaacatgctggggccctgcctctttgccttcgtgatcatggcctccatgtgggcttaccgctgcgggcaccggcgccagtgctaccccacctcgtggcagcgctgggccttctacctcctgcccggcgtctctatggcctctgtgggcatcgccatctacacctccatgatgactagcgacaactactactacacccacagcatctggcacatcctgctggccgggagcgcagccttgctgctgccgccacctgaccagcccgccgagccctgggcctgctcgcagaaattcccctgccactatcagatctgcaagaacgatcgggaggaactgtacgcagtgacgtgacactggcctggggacagctgctgctctgatgacctcttcagccaggagctgtatcgagggggaggcgcctggtccagccctggacagattgatttccagctgaata

SEQ ID NO: 445 - DNA, 499 bp, Homo sapiens
  misc_feature (338)..(338): n is a, c, g, or t
tgcctaagcctgtctgtgcttcagaggcccctccagtccctggctgtggggtaactgggggtatgagctgtggccacaggtgagcaaggcagggaactgcaatccagccctggccgcgggaggggccatctctggccaatgctgctgtgccttcaaggactgacaagttacgtaggggcagaggtcgccagctagccagtgtctcctccatctggggggcgtctgtccacttgtcaccttaggttttcactcatttgtcaccttggggttttgctctgtgtgtttcatatccaacggcaatacttgcagggggacagagtcctctaaatactccaatnctgcggtttttacaaacataaagggggagaccccaagtggaggaccctgggcctggagctccctcccaaactttgtccagcatccagcctgttccctgggctcactggggagggagttgtcttcatagcacacccagagccagggatccctttgtagtttt

SEQ ID NO: 446 - DNA, 462 bp, Homo sapiens
  misc_feature (352)..(352): n is a, c, g, or t
agcatctttcaagctccgttactatggcgatggccatgatgttacaatcccacttgcctgaataatcaagtgggaaggggaagcagagggaaatggggccatgtgaatgcagctgctctgttctccctaccctgaggaaaaaccaaagggaagcaacaggaacttctgcaactggtttttatcggaaagatcatcctgcctgcagatgctgttgaaggggcacaagaaattggagctggagaagattgatgaaagtgcaggtgtgtaaggaaatagaacagtctgctgggagtcagacctggaattctgattccaaactctttattactttgggaagtcactcagcctcccngtagccatctccagggtgacggaacccagtgtattacctgctggaaccaaggaaactaacaatgtaggttactagtgaataccccaatggtttctccaattatgcccatg

SEQ ID NO: 447 - DNA, 361 bp, Homo sapiens
gtggacctacctgataaataccctttcaaatctccatctataggattcatgaataaaattttccatcccaacattgatgaagcgtcaggaactgtgtgtctagatgtaattaatcaaacttggacagctctctatgatcttaccaatatatttgagtccttcctgcctcagttattggcctatcctaaccccatagatcctctcaatggtgacgctgcagccatgtacctccaccgaccagaagaatacaagcagaaaattaaagagtacatccagaaatacgccacggaggaggcgctgaaagaacaggaagagggtaccggggacagctcatcggagagctctatgtctgacttttccg

SEQ ID NO: 448 - DNA, 527 bp, Homo sapiens
gatcccgccaggcatgtgtgtgtgaatgcatgtgcaaagctctccatcagaagggtggtgtgggccctgcaggtcctacccctcggccttgaagctccctcgggctgcggactctgcctcctgggtctgagcattagaaccaggagaggggtgtccctgggcagagccaggggtgcaaacagcctgcagccatctggccttttaagtatagtgtgtcgcatttccgggtaggaaggtagcatttcaagttcaaagagaggtcaagtcatgcaaccatctttcctccagcacttttggggtaaggaggacagtttttgttatggtttaggggaaattttcatgaaattttcaccattaccaatagattactgatgtccatggcaagtgatctgttcttggtattttgttttgttttgttttggtttttaaatgtaatcacccattggtcaggcccaggactggtcaccatgagctctgctagccacggccccaacgatgcttccggctctcatggattccacagcaaa

SEQ ID NO: 449 - DNA, 390 bp, Homo sapiens
  misc_feature (35)..(35): n is a, c, g, or t
  misc_feature (93)..(93): n is a, c, g, or t
  misc_feature (108)..(108): n is a, c, g, or t
  misc_feature (187)..(189): n is a, c, g, or t
ttctagtgtttccccagttattgtgaccatccaanccaggatatatgtaaatgcggatatccatattgcagacatgaaaaaggttatcacaangtagtttttccaaancttttttctacaatctggtgtggttagaaaaagtaatgtaataataggaagggataatacccaaaaaattctttttaannntgcttcaggcatgttgaaaacacttggtggatcttcagaaacctgactaaggccatgtaaacttatagagagctgagagtagccagaatcttcataaaatattccactatcagttcttgattgccgacgaatgaatggttgaccttcatcttcccagcccatcagtggctgttgttcacttctctccatagctttggcaag

SEQ ID NO: 450 - DNA, 515 bp, Homo sapiens
  misc_feature (214)..(214): n is a, c, g, or t
  misc_feature (224)..(224): n is a, c, g, or t
cctaaggcctatcagcttctatcagcccgcagtgcctgcctgctgggcctgttggccgccaccaacgcgctgaccaatggcgtgctgcctgccgtgcagagcttttcctgcttaccctacgggcgtctggcctaccacctggctgtggtgctgggcagtgctgccaatcccctggcctgcttcctggccatgggtgtgctgtgcaggtccttgncagggctggncggcctctctctgctgggcgtgttctgtgggggctacctgatggcgctggcagtcctgagcccctgcccgcccctggtgggcacctcggcgggggtcgtcctcgtggtgctgtcgtgggtgctgtgtcttggcgtgttctcctacgtgaaggtggcagccagctccctgctgcatggcgggggccggccggcattgctggcagccggcgtggccatccaggtgggctctctgctcggcgctgttgctatgttccccccgaccagcatctatcacgtgttccacagcagaaa

SEQ ID NO: 451 - DNA, 387 bp, Homo sapiens
gcagcgtgagggtgcactcagggtgttgttagagcgtctcgtgtgtgctagacgcacccctactcgttcctatagaacacagaggacataggaaacccttaaaacacacatgggattctctggtcacagttttgggttcaggctatgctgctttgggcaggtggagcaccccccgaggaagcctgcaagtccagggcacaggctgccttttggagggagggctggcccataggtgctgctggctccccgccaccagctgggcctcagccctcacggcattcctgctgagcaccgtggggcacccagggagcaggggcgtcagggatcctgctgccggcacccctgtgccgctggcatgagggccgtgtccccactgtgaaggatgaa

SEQ ID NO: 452 - DNA, 449 bp, Homo sapiens
gtctcttagaaggacactggtcattggatttaaaggccacctgggtaatttatagtgatctaatctcaagaatctttccttaattacatgcaaatactctttatccaaattagtttgcattcacaaattctggagcttagtacttggacatatattttggggggttgatggttggaggggcttttattcaactcagtacatcttaataaggaattaatgccccccaacttgccttacaagtcatatattaaaaacaatgttggcctggcacagtggctcatgcctgtaatctcaacactttgggaagccaagggaggaggatcacttgagcccaggagttggagaccagcctggataacaaagggagacccagtttctacaaaatatttaaaaattagccaggcatgatggtgcatgcctgtggtcctagctattcagggaactgaggt

SEQ ID NO: 453 - DNA, 548 bp, Homo sapiens
gccggccctttgcaatgaatgactcttcctgagcctggcaccaggagccctaggcaggccgccgtctccccactcacagccccagcaggtaagcagtgtagacaaacccttggggcttttttatttggagaaccgtccagcatgcatcctggcccacggcctgagcaagctgcagcccttctgaggccatgggcttcgttggctaagttgggggtcttagccttgcatgcgttgtgggcatcaaatctacctccaaaagacccatcctggggagccctctggcccctcgttgccttttcacttcaaaacctcttttttctgggagaggccctgaaccctgtgcgggagagctggtcctccagccctggcaggccctcagccagcttcccagcaagacaaagggcacccttgtggctttgggacctaagtggttggggttcccgaggtcactgaggactggtacctcgggaacgcaagctgtcagtggaactgtcccacaagaattcacaggtctcaaagcaggaacagtgggtttgtgtctcacctga

SEQ ID NO: 454 - DNA, 569 bp, Homo sapiens
  misc_feature (268)..(268): n is a, c, g, or t
  misc_feature (290)..(290): n is a, c, g, or t
  misc_feature (295)..(295): n is a, c, g, or t
  misc_feature (324)..(325): n is a, c, g, or t
ttgtcttctacgaccagctgaagcaagtgatgaatgcgtacagagtcaagccggccgtctttgacctgctcctggctgttggcattgctgcctacctcggcatggcctacgtggctgtccaggtgagcagtgcccaggctcagcacttcagcctcctctacaagaccgtccagaggctgctcgtgaaggccaagacacagtgacacagccacccccacagccggagcccccgccgctccacagtccctggggccgagcacgagttggnaggggaccctcttctcccgtcntgccntcgggttgcccgcctcctccagagacttnncaagggcccatcaccactggcctctgggcacttgtgctgagactctgggacccaggcagctgccaccttgtcaccatgagagaatttggggagtgcttgcatgctagccagcaggctcctgtctgggtgccacggggccagcattttggagggagcttccttccttccttcctggacaggtcgtcatgatggatgcactgactgaccgtctggggctcaggctggtgtgggatgcagccggccg

SEQ ID NO: 455 - DNA, 516 bp, Homo sapiens
gtaggggttacaattcacattccttattctgagaatttggccccagctgtttgcctttgactccctgacctccagagccagggttgtgccttattgtcccatctgtgggcctcattctgccaaagctggaccaaggctaacctttctaagctccctaacttgggccagaaaccaaagctgagcttttaactttctccctctatgacacaaatgaattgagggtaggaggagggtgcacataacccttaccctacctctgccaaaaagtgggggctgtactggggactgctcggatgatctttcttagtgctacttctttcagctgtccctgtagcgacaggtctaagatctgactgcctcctcctttctctggcctcttcccccttccctcttctcttcagctaggctagctggtttggagtagaatggcaactaattctaatttttatttattaaatatttggggttttggttttaaagccagaattacggctagcacctagcatttcagcagag

SEQ ID NO: 456 - DNA, 334 bp, Homo sapiens
aattaagcattttcttgcctcctttgcttcatcttttcacaacagctggatagagggatcagaaatgactgtgtcatggtgctcattcactgcaaactcccagttgcaagctccttggctcccccggagggagcaagaatctcatagttcagagacacagagggccttttagccctaatgaccttttggatgggactgcaactcatgactatcctgatattggaagaaaggactttgttaatcttctcccccatagctctgctgcgtaggtctacatcttactcagaatcactacacattcctttagtcttcctccaagctccagagccattgg

SEQ ID NO: 457 - DNA, 569 bp, Homo sapiens
gggcaggtttggagcccatgggaccccgtgggtctctgtccaggagcagcagaggaggctgacaggccctgctccctctgctctgggggtgtctgggagccccagctcacaccctcccaatgcttatatgctgaagctcacagaatgggcttcttgcctgacagcaagtcaaagaatgagtttaatatcaaagtgtaagcttactttccatccccaagccagcctgccccctgccccatttcccatgagcacacttctggggaaggaaaacaggctcctggccttcactctcagcagagctttggagatgccccaggcatgccctgagctccttctgtgtacctgctcccacttctgagccacccgctgcccctccgcactgctggcaaacccagttcctgcctcagccaggtctccttccctggtttccagtcacacagagcccagcagctttctctttcagtcccataagggcagccttgtgtccctggccacacttccacccgccagggtcttcctccccatctttccatccttcctgctgagcttccacagagctcgtttgcaaa

SEQ ID NO: 458 - DNA, 467 bp, Homo sapiens
tacctcggagctgatgctgggcggaaccaacacactggtgctgcacaacacgtgtgaggactcgctgctggccgcacccatcatgctggacctagcgctgctgaccgagctgtgccagcgcgtgagcttctgcactgacatggaccccgagccgcagaccttccaccccgtgctgtccctgctcagcttcctcttcaaggcgccactagtgccgcccggcagcccggtggtcaatgcgcttttccgccagcgcagctgcatcgagaacatcctcagggcctgcgtggggctcccgccacagaaccacatgctcctggaacacaaaatggagcgcccagggcccagcctcaagcgagttggacccgtggctgccacctaccctatgttgaacaagaaaggaccggtacccgctgccaccaatggctgcaccggtgatgccaatgggcatctgcaagaggagcccccaa

SEQ ID NO: 459 - DNA, 254 bp, Homo sapiens
attagctatagattccactggccttaaacatacaattaagtgtatacatgatatagtgcacacacaaaagccacctttaattattgaaataacctgtattctttttggaaatcatttaagtttggtattgaagtactatattttttgtgcatcaatgtatttttctatttacaagcctatgtaaaagtgaagtgtatcttcagtgaaccatgtgccaattaagctgtaataaaaaagtggtctagtctgtcaaa

SEQ ID NO: 460 - DNA, 338 bp, Homo sapiens
  misc_feature (95)..(95): n is a, c, g, or t
  misc_feature (99)..(99): n is a, c, g, or t
cttttgctgaggttttctctgaggtttttttgatgctttataggaaactattttttaaaaaaagccatttcccacccaaggacacagtggatgtntttnccctgactccagcagggcaaggaatgtagccgagaggttgtgtgggctgggctctggtgccctcttccctggccaggacacctctcctcctgattcccttggcaccttgtctttctgtctgtttacctgtctccctgcctgcccatctgcatcttttgcagcccactctgacttccatctgggggctgagaccacccttgcctgcccccttctttctgccttaagaatgtccttttagg

SEQ ID NO: 461 - DNA, 544 bp, Homo sapiens
  misc_feature (158)..(172): n is a, c, g, or t
  misc_feature (182)..(185): n is a, c, g, or t
  misc_feature (220)..(220): n is a, c, g, or t
  misc_feature (257)..(257): n is a, c, g, or t
  misc_feature (305)..(320): n is a, c, g, or t
  misc_feature (401)..(401): n is a, c, g, or t
  misc_feature (504)..(504): n is a, c, g, or t
agggagtcccagagccctggaccttgggcctagaccgcgtgataaaactgggttgagggatgctggaaccagttacgactgaagtcagtgtagacctgagctgggagggaacctgttagtctccccacctcttccctgaagagacaggcacccctccnnnnnnnnnnnnnnngagggagtgnnnnttctgccttgagtccccaggggaaaaaaaaaaaangatatttatgaaataaatggtaatttgtgtaaataangctttaaggttcccagaatatgcaaattggtattaatttattcaaagnnnnnnnnnnnnnnnnacatatatttagagattaactcatacatttaaagtttttttcattttacgtgagcatctatattgtacagggctggggggncccttggctgcgggagaaggcccagagccctggaggagccaccaccccgccggcccctcgacccctcggcccctcggcccctccgcccgggtttggctcgccnggcccgcgggctccacctcaggttttcacttttcgctccg

SEQ ID NO: 462 - DNA, 238 bp, Homo sapiens
ttttcctgggactgccatattttcttttaactggaaatttttatgtgagttttccttttggtgcatggaactgtggttgccaaggtatttaaaagggctttcctgcctccttctctttgatttatttaatttgatttgggctataaaatatcatttttcaggtttattcttttagcaggtgtagttaaacgacctccactgaactgggtttgacctctgttgtactgatgtgttgtga

SEQ ID NO: 463 - DNA, 388 bp, Homo sapiens
  misc_feature (26)..(26): n is a, c, g, or t
  misc_feature (36)..(36): n is a, c, g, or t
  misc_feature (53)..(53): n is a, c, g, or t
  misc_feature (215)..(215): n is a, c, g, or t
  misc_feature (254)..(275): n is a, c, g, or t
  misc_feature (298)..(298): n is a, c, g, or t
gggtcgtatcactttgtctctcctancccccactgnccccgagtgtcgggcancgatgtacatatggaggtggggtggacagggtgctgtgccccttcagagggagtgcagggcttggggtgggcctagtcctgctcctagggctgtgaatgttttcagggtggggggagggagatggagcctcctgtgtgtttggggggaagggtgggtggggncctcccacttggccccggggttcagtggtattttatacnnnnnnnnnnnnnnnnnnnnnntgggaaaggctgtgtgagggganagaagggagagggtgggcctgctgtggacaatggcatactctcttccagccctaggaggagggctcctaacagtgtaacttattgtgtcc

SEQ ID NO: 464 - DNA, 345 bp, Homo sapiens
  misc_feature (67)..(83): n is a, c, g, or t
  misc_feature (137)..(137): n is a, c, g, or t
  misc_feature (143)..(146): n is a, c, g, or t
  misc_feature (148)..(155): n is a, c, g, or t
  misc_feature (157)..(157): n is a, c, g, or t
  misc_feature (160)..(160): n is a, c, g, or t
  misc_feature (162)..(162): n is a, c, g, or t
  misc_feature (164)..(164): n is a, c, g, or t
  misc_feature (166)..(168): n is a, c, g, or t
  misc_feature (170)..(188): n is a, c, g, or t
  misc_feature (247)..(248): n is a, c, g, or t
gatttgaccggcaggcttctgcggagggctgcttctacaacgctgactacctggcggcccgagcccnnnnnnnnnnnnnnnnngcaggccaggaagaggaggaagccctggaggggctggaggtgatggatgttttnctccgnnnntnnnnnnnncnccncntntnnngnnnnnnnnnnnnnnnnnnngtgcagaagttctccctgcgagactgcagcccacggctcagtgaagaactctaccaccnntgccgcctcagcaacctggaggggctagggggccgtgcccagctggctatggctctctttgagcaggagcaggccaatagcacttagcccgcctggg

SEQ ID NO: 465 - DNA, 244 bp, Homo sapiens
  misc_feature (92)..(128): n is a, c, g, or t
tgaagtgcaactgaaagctgctagtgatgatctggtaatatacaatttgtccagtagccagtttgtttttattgtgttttctaaccataagnnnnnnnnnnnnnnnnnnnnnnnnnnnnnnnnnnnnnacacaaaaaaatggtcaccgcaggccatactaccaatgaaatggtaggtaaacaaatcttctggtcaagagaaaaaaaaaagaaatagcactctgcatgctttgctctacaagatg

SEQ ID NO: 466 - DNA, 578 bp, Homo sapiens
  misc_feature (138)..(138): n is a, c, g, or t
  misc_feature (141)..(141): n is a, c, g, or t
  misc_feature (145)..(145): n is a, c, g, or t
  misc_feature (148)..(148): n is a, c, g, or t
  misc_feature (165)..(165): n is a, c, g, or t
  misc_feature (168)..(170): n is a, c, g, or t
  misc_feature (377)..(377): n is a, c, g, or t
  misc_feature (424)..(451): n is a, c, g, or t
  misc_feature (453)..(453): n is a, c, g, or t
  misc_feature (485)..(485): n is a, c, g, or t
  misc_feature (487)..(487): n is a, c, g, or t
  misc_feature (489)..(489): n is a, c, g, or t
  misc_feature (495)..(495): n is a, c, g, or t
  misc_feature (497)..(497): n is a, c, g, or t
  misc_feature (517)..(517): n is a, c, g, or t
  misc_feature (522)..(522): n is a, c, g, or t
  misc_feature (528)..(528): n is a, c, g, or t
  misc_feature (531)..(531): n is a, c, g, or t
gaaatccttcctgctcaggctttcattctaaaactacagtcttcattaaagctgaactttctgggtagctgagcttatatgcccggcatctgaatgagagctctctttgtaactgtgtgacttgagatctagtttgcnagntccnggnaaacaatacatgtgttnttnnntttgtgtttgctcagcaagcagatgtctgagatgtaagaagcttttcttttcctgtggcattgattctgacttagagctgaagtaaagatcactgaaacatcacgtcaagttgaagtcactcataggtctttgtcctttaggcaggacaggagagtcattaagaagcatttcactgtagcattctatcacaatatcatctggaattnttttctttgcccagaaagccttaacttgcctctagagaatccctggnnnnnnnnnnnnnnnnnnnnnnnnnnnntncaactcttctgctgtggaagtttgaagcgacngncnaggcananccagagaatttcctcaagtngcctntaggtnccntgttatcttatgcccccacccctccctcaacaatatgagtgatccag

SEQ ID NO: 467 - DNA, 481 bp, Homo sapiens
gcggtggagccgcaaccaaaatgcagattttcgtgaaaacccttacggggaagaccatcaccctcgaggttgaaccctcggatacgatagaaaatgtaaaggccaagatccaggataaggaaggaattcctcctgatcagcagagactgatctttgctggcaagcagctagaagatggacgtactttgtctgactacaatattcaaaaggagtctactcttcatcttgtgttgagacttcgtggtggtgctaagaaaaggaagaagaagtcttacaccactcccaagaagaataagcacaagagaaagaaggttaagctggctgtcctgaaatattataaggtggatgagaatggcaaaattagtcgccttcgtcgagagtgcccttctgatgaatgtggtgctggggtgtttatggcaagtcactttgacagacattattgtggcaaatgttgtctgacttactgtttcaacaaaccaga

SEQ ID NO: 468 - DNA, 452 bp, Homo sapiens
gtaaaggctgttctggctttttatcttcttagctcatcttaaataagcagtacacttggatgcagtgcgtctgaagtgctaatcagttgtaacaatagcacaaatcgaacttaggatttgtttcttctcttctgtgtttcgatttttgatcaattctttaattttggaagcctataatacagttttctattcttggagataaaaattaaatggatcactgatattttagtcattctgcttctcatctaaatatttccatattctgtattaggagaaaattaccctcccagcaccagcccccctctcaaacccccaacccaaaaccaagcattttggaatgagtctcctttagtttcagagtgtggattgtataacccatatactcttcgatgtacttgtttggtttggtattaatttgactgtgcatgacagcggcaatcttttctttggtc

SEQ ID NO: 469 - DNA, 515 bp, Homo sapiens
ggtcacgttcttggatcctcagaactctttgctcttgtcggggtgggggtgggaactcacgtggggagcggtggctgagaaaatgtaaggattctggaatacatattccatggactttccttccctctcctgcttcctcttttcctgctccctaacctttcgccgaatggggcagacaaacactgacgtttctgggtggccagtgcggctgccaggttcctgtactactgccttgtacttttcattttggctcaccgtggattttctcataggaagtttggtcagagtgaattgaatattgtaagtcagccactgggacccgaggatttctgggaccccgcagttgggaggaggaagtagtccagccttccaggtgggcgtgagaggcaatgactcgttacctgccgcccatcaccttggaggccttccctggccttgagtagaaaagtcggggatcggggcaagagaggctgagtacggatgggaaactattgtgcacaagtctttccagagga

SEQ ID NO: 470 - DNA, 378 bp, Homo sapiens
ccctggtttgcagctgttttcaaagcccccgataatcgctcttttccactccaagatgccctcataaaccaatgtggcaagactactggacttctatcaatggtactctaatcagtccttattatcccagcttgctgaggggcagggagagcgcctcttcctctgggcagcgctatctagataggtaagtgggggcggggaagggtgcatagctgttttagctgagggacgtggtgccgacgtccccaaacctagctaggctaagtcaagatcaacattccagggttggtaatgttggatgatgaaacattcatttttaccttgtggatgctagtgctgtagagttcactgttgtacacagtctgttttctatttgtt

SEQ ID NO: 471 - DNA, 511 bp, Homo sapiens
aacactgcataacccgtttctttgaggagtgtgaccccaacaaggataagcacatcaccctgaaggagtggggccactgctttggaattaaagaagaggacatagatgaaaatctcttgttttgaacgaagattttaaagaactcaactttccagcatcctcctctgttctaaccacttcagaaatatatgcagctgtgatacttgtagatttatatttagcaaaatgttagcatgtatgacaagacaatgagagtaattgcttgacaacaacctatgcaccaggtatttaacattaactttggaaacaaaaatgtacaattaagtaaagtcaacatatgcaaaatactgtacattgtgaacagaagtttaattcatagtaatttcactctctgcattgacttatgagataattaatgattaaactattaatgataaaaataatgcatttgtattgttcataatatcatgtgcacttcaagaaaatggaatgctactcttttgtggtttac

SEQ ID NO: 472 - DNA, 215 bp, Homo sapiens
ttctgagtgtagtgtggtaggacccggcgggtgtgcagcaactgccctggagccccagcccctgcgtccatctgtgctgtgcgccccacagtagacgtgcagacgtccctgagaggttcttgaagatgtttatttatattgtccttttttactggaagacgtacgcatactccatcgatgttgtatttgcagtggctgaggaattcttgtacgca

SEQ ID NO: 473 - DNA, 381 bp, Homo sapiens
ctctcttagctcagttactcaattcatacgtagtattttttaaaataattttatatctgtgtaccaccccatatatttcatattactgtttcacatgtacagctttctacttctttgtaagaacaccaaccaaccaaggtttaagtgattaataggcttgagcaccgggtggcagatgttctatgcagtgtggttcaagtttctttgaccgcacttatatgcattgctaatatggaatttaagataccatacacagtctctcatggacctatctctattgtagaattatgacttatgtcttacttggcaaatttttctgaatgtgacctttttttgctgatttgctgggtttgggattaactagcattattttgccacctt

SEQ ID NO: 474 - DNA, 484 bp, Homo sapiens
gccattacagtatccaatgtcttttgacaggtgcctgtccttgaaaaacaaagtttctatttttatttttaattggtttagttcttaactgctggccaactcttacatccccagcaaatcatcgggccattggattttttccattatgttcatcacccttatatcatgtacctcagatctctctctctctcctctctctcagttatatagtttcttgtcttggactttttttttcttttctttttctttttttttttgctttaaaacaagtgtgatgccatatcaagtccatgttattctctcacagtgtactctataagaggtgtgggtgtctgtttggtcaggatgttagaaagtgctgataagtagcatgatcagtgtatgcgaaaaggtttttaggaagtatggcaaaaatgttgtattggctatgatggtgacatgatatagtcagctgccttttaagaggtcttatctgttcagtgtt

SEQ ID NO: 475 - DNA, 563 bp, Homo sapiens
agagtgcagttcccatgagtcacttcctgaacccattgaccaaaggtggacagagacaatcctgtagaccttgacattcagaaagatgtgagctgcttactgatcatatatgcatacgtttctttacagcagaggaaaccattgtccacaaaactgatgttcttttggggttttatgtacagacttgtccaatcatgtgtgtggttcctgcgagttgctgatgactccgcattgaagctctctgagttctttgattttaagttgggtttatggaattttttcaaatgttggaaggcgtgtggttcttcctgccctccctccccttttggaaatatgaaagcaaatgtttagaagaattccttttgaaaagctgtgtcgtgttccctgtgaaactgagcaggtgtgtgttggcgcgctaagtgccacatgcttgtgtgtagaggaggaggtggccctgccggctccgcgctgctgtgcctgtgatccctacctgctccccgctcctgttgccagcagcactcactgcactcctttgtcatatactctgcatcactgtcatactc

SEQ ID NO: 476 - DNA, 295 bp, Homo sapiens
agaaatgcctcacagctatcgtgaagtgcgccacaagcaaaccagctttctttgcagagaagcttcatcaagccatgaaaggtgttggaactcgccataaggcattgatcaggattatggtttcccgttctgaaattgacatgaatgatatcaaagcattctatcagaagatgtatggtatctccctttgccaagccatcctggatgaaaccaaaggagattatgagaaaatcctggtggctctttgtggaggaaactaaacattcccttgatggtctcaagctatgatcagaag

SEQ ID NO: 477 - DNA, 360 bp, Homo sapiens
gcaataactctgggaggggctcgagagggctggtccttatttatttaacttcacccgagttcctctgggtttctaagcagttatggtgatgacttagcgtcaagacatttgctgaactcagcacattcgggaccaatatatagtgggtacatcaagtccatctgacaaaatggggcagaagagaaaggactcagtgtgtgatccggtttctttttgctcgcccctgttttttgtagaatctcttcatgcttgacatacctaccagtattattcccgacgacacatatacatatgagaatataccttatttatttttgtgtaggtgtctgccttcacaaatgtcattgtctactcctagaa

SEQ ID NO: 478 - DNA, 461 bp, Homo sapiens
agcccacagtgcctgtacaggaaggtgcctggccatgtcacctggctgctaggccagagccatgccaggctgcgtccctccgagcttgggataaagcaaggggaccttggcgctctcagctttccctgccacatccagcttgttgtcccaatgaaatactgagatgctgggctgtctctcccttccaggaatgctgggcccccagcctggccagacaagaagactgtcaggaagggtcggagtctgtaaaaccagcatacagtttggcttttttcacattgatcatttttatatgaaataaaaagatcctgcatttatggtgtagttctgagtcctgagacttttctgcgtgatggctatgccttgcacacaggtgttggtgatggggctgttgagatgcctgttgaaggtacatcgtttgcaaatgtgagtttcctctcctgtccgtgtttgtttagtac

SEQ ID NO: 479 - DNA, 541 bp, Homo sapiens
catgtgcacacagattattttttggctccaaaactggattgcaaaagaaagaggagaagaatattttgtgtgttcctggtattcttttataagtaaagtttacccaggcatggaccagcttcagccagggacaaaatcccctcccaaaccactctccacagctttttaaaaatacttctactcttaacaattacctaaggcttcctcaactgccccaaatctcttaatagcttctagtgctgctacaatctaagtcaggtcaccagagggaagagaacatggcattaaaagaatcacatcttcagaagagaagacactaatattattacccatatacatgatttcagaagatgacataagattcctcttaaagaggaaatgtcaggaatcaagccactgaatccttaaagagaaaagttgaatatgagtcattgtgtctgaaaactgcaaagtgaacttaactgagatccagcaaacaggttctgtttaagaaaaataatttatactaaatttagtaaaatggacttcttattcaaagcat

SEQ ID NO: 480 - DNA, 488 bp, Homo sapiens
gttttggctgaaattctcctggaggtcggtaggttcagccaaggttttataaggctgatgtcaatttctgtgttgccaagctccaagccccatcttctaaatggcaaaggaaggtggatggccccagcacagcttgacctgaggctgtggtcacagcggaggtgtggagccgaggcctaccccgcagacaccttggacatcctcctcccacccggctgcagaggccagaggcccccagcccagggctcctgcacttacttgcttatttgacaacgtttcagcgactccgttggccactccgagaggtgggccagtctgtggatcagagatgcaccaccaagccaagggaacctgtgtccggtattcgatactgcgactttctgcctggagtgtatgactgcacatgactcgggggtggggaaaggggtcggctgaccatgctcatctgctggtccgtgggacggtgcccaagccagaggctgggttca

SEQ ID NO: 481 - DNA, 547 bp, Homo sapiens
  misc_feature (97)..(99): n is a, c, g, or t
  misc_feature (135)..(135): n is a, c, g, or t
  misc_feature (258)..(258): n is a, c, g, or t
agcatcggagccattcattcggagaaaacgttttgatcaaaatggagacttttgtagtcgtttcaaaagagcacctgagtcatgtgtattcccggcnnnctttataaatgacccggtcaagttggtttcaaagtncgacaggcttgtctgtttactagctgcgtggccttggacgggtggctgacatctgtaaagaatcctcctgtgatgaaactgaggaatcgggtggccgggcaagctgggaagagcaaagccagnagctgcgctgcctcaatacccacaaaagaccattcccagtatacataagcacaggatgtttttctcaagagggatgtatttatcacttggacatctgtttataatataaacagacatgtgactgggaacatcttgctgccaaaagaatcctaggcagtggctcattgtatgtgaggttgaaccacgtgaaattgccaatattaggctggcttttatctacaaagaaggagtttcatggggttcagcctaacagttatggaaactacagtccttataaaccattggcatg

SEQ ID NO: 482 - DNA, 451 bp, Homo sapiens
ggcactgtgtgggtcaactgctatgatgtgtttggagcccagtcaccctttggtggctacaagatgtcggggagtggccgggagttgggcgagtacgggctgcaggcatacactgaagtgaaaactgtcacagtcaaagtgcctcagaagaactcataagaatcatgcaagcttcctccctcagccattgatggaaagttcagcaagatcagcaacaaaaccaagaaaaatgatccttgcgtgctgaatatctgaaaagagaaatttttcctacaaaatctcttgggtcaagaaagttctagaatttgaattgataaacatggtgggttggctgagggtaagagtatatgaggaaccttttaaacgacaacaatactgctagctttcaggatgatttttaaaaaatagattcaaatgtgttatcctctctctgaaacgcttcctataactc

SEQ ID NO: 483 - DNA, 364 bp, Homo sapiens
atgatccagaaatacttaacacgtgaatattttgctaaaaaagcatatataactattttaaatatccatttatcttttgtatatctaagactcatcctgatttttactatcacacatgaataaaggcctttgtatctttctttctctaatgttgtatcatactcttctaaaacttgagtggctgtcttaaaagatataaggggaaagataatattgtctgtctctatattgcttagtaagtatttccatagtcaatgatggtttaataggtaaaccaaaccctataaacctgacctcctttatggttaatactattaagcaagaatgcagtacagaattggatacagtacggatttgtccaaat

SEQ ID NO: 484 - DNA, 468 bp, Homo sapiens
ttagcgttcatccgtgtaacccgctcatcactggatgaagattctcctgtgctagatgtgcaaatgcaagctagtggcttcaaaatagagaatcccactttctatagcagattgtgtaacaattttaatgctatttccccaggggaaaatgaaggttaggatttaacagtcatttaaaaaaaaaatttgttttgacggatgattggattattcatttaaaatgattagaaggcaagtttctagctagaaatatgattttatttgacaaaatttgttgaaattatgtatgtttacatatcacctcatggcctattatattaaaatatggctataaatatataaaaagaaaagataaagatgatctactcagaaatttttatttttctaaggttctcataggaaaagtacatttaatacagcagtgtcatcagaagataacttgagcaccgtcatggcttaatgtttatt

SEQ ID NO: 485 - DNA, 357 bp, Homo sapiens
cagggctgtcatcaacatggatatgacatttcacaacagtgactagttgaatcccttgtaacgtagtagttgtctgctctttgtccatgtgttaatgaggactgcaaagtcccttctgttgtgattcccaggacttttcctcaagaggaaatctggatttccacctaccgcttacctgaaatgcaggatcacctacttactgtattctacattattatatgacatagtataatgagacaatatcaaaagtaaacatgtaatgacaatacatactaacattcttgtaggagtggttagagaagctgatgcctcatttctacattctgtcattagctattatcatctaacgtttcagtg

SEQ ID NO: 486 - DNA, 436 bp, Homo sapiens
gagtggactattaaatgtgcctaaatgaattttgcagtaactggtattcttgggttttcctacttaatacacagtaattcagaacttgtattctattatgagtttagcagtcttttggagtgaccagcaactttgatgtttgcactaagattttatttggaatgcaagagaggttgaaagaggattcagtagtacacatacaactaatttatttgaactatatgttgaagacatctaccagtttctccaaatgccttttttaaaactcatcacagaagattggtgaaaatgctgagtatgacacttttcttcttgcatgcatgtcagctacataaacagttttgtacaatgaaaattactaatttgtttgacattccatgttaaactacggtcatgttcagcttcattgcatgtaatgtagacctagtccatcaga

SEQ ID NO: 487 - DNA, 470 bp, Homo sapiens
  misc_feature (63)..(63): n is a, c, g, or t
  misc_feature (83)..(83): n is a, c, g, or t
tctgaggctagatatgtctggctgaagatttgatgtggttcctccttaagctatgcgtcctgnttaataataggtactgtacngggctctgtgtaagtgtcgttggggtaggacctatattttaatactgttcctaacatttcattttactagcgagaaatctttgatttcattttattctttgtaattctagacactagattgtagtttagccataactgatgttttttaaaaagggatatattttcttgcacagttgttcaaaaaagagacaagtttcagtcctcaatgctgtcctttgttttacaggtacaagttttctagctcagacaaactatgaaaaactgtagactattctcaaggtattaactcgcagaccctctgggggtaggggctgttttctaagttacaggcagagtgggactgagatggtacagtgtgcacagacaggtactgagctgacagactgg

SEQ ID NO: 488 - DNA, 446 bp, Homo sapiens
ggcttcatttcaagagtcatccagcaatgagagaatcctgcctctgtagaccaacatccagtgtgattttgtgtctgagaccacaccccagtagcaggttacgccatgtcaccgagccccattgattcccagagggtcttagtcctggaaagtcaggccaacaagcaacgtttgcatcatgttatctcttaagtattaaaagttttattttctaaagtttaaatcatgtttttcaaaatatttttcaaggtggctggttccatttaaaaatcatctttttatatgtgtcttcggttctagacttcagcttttggaaattgctaaatagaattcaaaaatctctgcatcctgaggtgatatacttcatatttgtaatcaactgaaagagctgtgcattataaaatcagttagaatagttagaacaattcttatttatgcccacaacc

SEQ ID NO: 489 - DNA, 549 bp, Homo sapiens
cggtggaggtcttgccggaggtagcagtggaagctactactccagcagcagtgggggtgtcggcctaggtggtgggctcagtgtggggggctctggcttcagtgcaagcagtggccgagggctgggggtgggctttggcagtggcgggggtagcagctccagcgtcaaatttgtctccaccacctcctcctcccggaagagcttcaagagctaagaacctgctgcaagtcactgccttccaagtgcagcaacccagcccatggagattgcctcttctaggcagttgctcaagccatgttttatccttttctggagagtagtctagaccaagccaattgcagaaccacattctttggttcccaggagagccccattcccagcccctggtctcccgtgccgcagttctatattctgcttcaaatcagccttcaggtttcccacagcatggcccctgctgacacgagaacccaaagttttcccaaatctaaatcatcaaaacagaatccccaccccaatcccaaattttgttttggttctaactacctccag

SEQ ID NO: 490 - DNA, 474 bp, Homo sapiens
gagggaaggtgattggtagtgagttaaaagaaaaagagaggaaaagagagtagttttgtcttcaagtaaaatgtctggttgtgccagacatttcacaagtgtgaaaggagataggagaagctcaacttgagggcgtgtagtaagttgtagaaggctcgaggggacgtggacttatttgccttggtttgcaatacctgcaaataatgagtttgaaaagaaacaatgaaatgtgttaaaaatttgaccatattagataaattttggtggatttagtcataagatggaaaaagactggtgaatcttttattacaaaatgtttctgttaaaatgggatcatcatctttgaaaggggggaggaggagtaaaagcccgattataatggtgatcaattcaagtcagtgttgactattctgtgaaatatatttggccagtggaaatgataatcagaaaagactgtaaatagatccatccaaa

SEQ ID NO: 491 - DNA, 378 bp, Homo sapiens
agaacatggtaagcctggtattttttaatcaaacaaaatatttatgaaatgggttttctcttaattctggattcatcatggctttctaataccaattgtaatatttacaatattcaccaaaacttagaattttgcaaatgcaggaattctgccagtgtttctttgctaagccttgcatgcaaaatttgaaattttaacattggcacccaaaacctacatggaatgtatgtctggagtatttcaaactttacattgaaacataatttccttggaaaacaaaccataagcctgaggaggtttttatcaactggaatgctttatattagtttgtttttcactgtacattcctcattttacattcatttaacctgccgatta

SEQ ID NO: 492 - DNA, 542 bp, Homo sapiens
gaaaaagcacctgaattctcaatgcagggtctaaaagctggtgttattgctgttattgtggttgtggtgatagcagttgttgctggaattgttgtgctggttatttccagaaagaagagaatggcaaagtatgagaaggctgagataaaggagatgggtgagatgcatagggaactcaatgcataactatataatttgaagattatagaagaagggaaatagcaaatggacacaaattacaaatgtgtgtgcgtgggacgaagacatctttgaaggtcatgagtttgttagtttaacatcatatatttgtaatagtgaaacctgtactcaaaatataagcagcttgaaactggctttaccaatcttgaaatttgaccacaagtgtcttatatatgcagatctaatgtaaaatccagaacttggactccatcgttaaaattatttatgtgtaacattcaaatgtgtgcattaaatatgcttccacagtaaaatctgaaaaactgatttgtgattgaaagctgcctttctatttacttgagtct

SEQ ID NO: 493 - DNA, 456 bp, Homo sapiens
tcagcagtatagggaccttccgcacaagctctgtgttaagattgacaataatagtggggccattttcattttagtcttttctaagagtcaaccacaggcatttaagtcagccaaagaatattgttaccttaaagcactattttatttatagatatatctagtgcatctacatctctatactgtacactcacccataattcaaacaattacaccatggtataaagtgggcatttaatatgtaaagattcaaagtttgtctttattactatatgtaaattagacattaatccactaaactggtcttcttcaagagagctaagtatacactatctggtgaaacttggattctttcctataaaagtgggaccaagcaatgatgatcttctgtggtgcttaaggaaacttactagagctccactaacagtctcataaggaggcagccatcataaccattga

SEQ ID NO: 494 - DNA, 513 bp, Homo sapiens
atgctggtttctgtagggtatttttaattttgtcagaaattttagattgtgaatattttgtaaaaaacagtaagcaaaattttccagaattcccaaaatgaaccagataccccctagaaaattatactattgagaaatctatggggaggatatgagaaaataaattccttctaaaccacattggaactgacctgaagaagcaaactcggaaaatataataacatccctgaattcaggcattcacaagatgcagaacaaaatggataaaaggtatttcactggagaagttttaatttctaagtaaaatttaaatcctaacacttcactaatttataactaaaatttctcatcttcgtacttgatgctcacagaggaagaaaatgatgatggtttttattcctggcatccagagtgacagtgaacttaagcaaattaccctcctacccaattctatggaatattttatacgtctccttgtttaaaatctgactgctttactttgatgtatcatat

SEQ ID NO: 495 - DNA, 492 bp, Homo sapiens
tcctgtctatcacaatcagcctctgaaccccgcgcccagcagagacccacactaccaggacccccacagcactgcagtgggcaaccccgagtatctcaacactgtccagcccacctgtgtcaacagcacattcgacagccctgcccactgggcccagaaaggcagccaccaaattagcctggacaaccctgactaccagcaggacttctttcccaaggaagccaagccaaatggcatctttaagggctccacagctgaaaatgcagaatacctaagggtcgcgccacaaagcagtgaatttattggagcatgaccacggaggatagtatgagccctaaaaatccagactctttcgatacccaggaccaagccacagcaggtcctccatcccaacagccatgcccgcattagctcttagacccacagactggttttgcaacgtttacaccgactagccaggaagtacttccacctcgggcacattttgggaag

SEQ ID NO: 496 - DNA, 536 bp, Homo sapiens
ctcaaagagtatatgttccctccaggtcagctgcccccaaaccccctccttacgctttgtcacacaaaaagtgtctctgccttgagtcatctattcaagcacttacagctctggccacaacagggcattttacaggtgcgaatgacagtagcattatgagtagtgtgaattcaggtagtaaatatgaaactagggtttgaaattgataatgctttcacaacatttgcagatgttttagaaggaaaaaagttccttcctaaaataatttctctacaattggaagattggaagattcagctagttaggagcccattttttcctaatctgtgtgtgccctgtaacctgactggttaacagcagtcctttgtaaacagtgttttaaactctcctagtcaatatccaccccatccaatttatcaaggaagaaatggttcagaaaatattttcagcctacagttatgttcagtcacacacacatacaaaatgttccttttgcttttaaagtaatttttgactcccagatcagtcagagcccc

SEQ ID NO: 497 - DNA, 555 bp, Homo sapiens
aagttactctcatcagtcgttcatggtcacaacctgaggtactctgctgagtgggcaaggctgaagtaagaggcctgtggaatgcagcattacctgctggacagagcagggcaggcagttctatgccttggagctcctgactgcagggactctgtccccacactcagaaagactcagctcactcaatgagagaatgtgatttactttatagaacgtataatcaactttgttgaataatttgttctattaaggctgtctaaaatgtgatgtcttcatcatagtatgaagtgttgaaaattaataacgagcctagtttaggaaaaagctgcttaaaactgtggctctaagagagtaatcataaaataccttagataaaattgcactatggaattttcattgagtatgtttaaattattggcttgtctactaatacatctgcttcaaaatgaacatatttcataaaattggcatcaattttaatgacgctcctggtatggaacctcagatataccctattggagacaatcctttgatcataaattctccccaactata

SEQ ID NO: 498 - DNA, 507 bp, Homo sapiens
gcagaacactgcagtcagatcctgttacttgcttcagtggaccgaaatctgtattctgtttgcgtacttgtaatatgtatattaagaagcaataactatttttcctcattaatagctgccttcaaggactgtttcagtgtgagtcagaatgtgaaaaaggaataaaaaatactgttgggctcaaactaaattcaaagaagtactttattgcaactcttttaagtgccttggatgagaagtgtcttaaattttcttcctttgaagctttaggcagagccataatggactaaaacattttgactaagtttttataccagcttaatagctgtagttttccctgcactgtgtcatcttttcaaggcatttgtctttgtaatattttccataaatttggactgtctatatcataactatacttgatagtttggctataagtgctcaatagcttgaagcccaagaagttggtatcgaaatttgttgtttgtttaaacccaagtgctgcacaaa

SEQ ID NO: 499 - DNA, 213 bp, Homo sapiens
acttttgtatcttttatcctgggagcactgcgttttcctagctgtgttattcctggtttaattcagcagagaaggtaaggtgtgaacctacctgccttggagaggcccaggtcccaaatctcttcaaattcttcacatgtttaactttaaggatttgaaccatgaagtcataggttacagacctcagttttatgccccattggattacttttt

SEQ ID NO: 500 - DNA, 173 bp, Homo sapiens
tttcttttgaggcatgcacatctggaattaaggtcaaactaattctcacatccctctaaaagtaaactactgttaggaacagcagtgttctcacagtgtggggcagccgtccttctaatgaagacaatgatattgacactgtccctctttggcagttgcattagtaactttga

SEQ ID NO: 501 - DNA, 531 bp, Homo sapiens
ctgttagctcctcactgtggtaaatgccacacacctttaagtagataagcagacgatagttatctgttcttttgacttaatctcatttggtttgattttccctctactaaggctttcctaccttcttcaggctgcctaagacatgtaagcgaaacacttcaataattgtccatgaggagaaaaaaagcattgtcatgcatgaaggaaactgaacttgaggtggcctccttgcttgttacatacctgggtatgtgtaggcagtttagtgcatctttgcctctcagttgaaacctgtataaccctgttacaaagctgtgttgttgcttcttgtgaaggccatgatattttgttttttccccaattaattgctattgtgttattttactaacttctctctgtattttttcttgcattgacattatagacattgaggacctcatccaaacaatttaaaaatgagtgtgaagggggaacaagtcaaaatatttttaaaagatcttcaaaaataatgcctctgtctagcatgccaac

SEQ ID NO: 502 - DNA, 511 bp, Homo sapiens
aagagaatgttcctactcacacttcagctgggtcacatccatccctccattcatccttccatccatctttccatccattacctccatccatccttccaacatatatttattgagtacctactgtgtgccaggggctggtgggacagtggtgacatagtctctgccctcatagagttgattgtctagtgaggaagacaagcatttttaaaaaataaatttaaacttacaaactttgtttgtcacaagtggtgtttattgcaataaccgcttggtttgcaacctctttgctcaacagaacatatgttgcaagaccctcccatgggggcacttgagttttggcaaggctgacagagctctgggttgtgcacatttctttgcattccagctgtcactctgtgcctttctacaactgattgcaacagactgttgagttatgataacaccagtgggaattgctggaggaaccagaggcacttccaccttggctgggaagactatggtgctgccttgc

SEQ ID NO: 503 - DNA, 324 bp, Homo sapiens
gtatgacaacccgggatcgtttgcaagtaactgaatccattgcgacattgtgaaggcttaaatgagtttagatgggaaatagcgttgttatcgccttgggtttaaattatttgatgagttccacttgtatcatggcctacccgaggagaagaggagtttgttaactgggcctatgtagtagcctcatttaccatcgtttgtattactgaccacatatgcttgtcactgggaaagaagcctgtttcagctgcctgaacgcagtttggatgtctttgaggacagacattgcccggaaactcagtctatttattcttcagcttgccc

SEQ ID NO: 504 - DNA, 122 bp, Homo sapiens
cttgccctttgtacacaagttcccagggtgagcagcttttggatttaatatgaacatgtacagcgtgcatagggactcttgccttaaggagtgtaaacttgatctgcatttgctgatttgtt

SEQ ID NO: 505 - DNA, 444 bp, Homo sapiens
gaagccctggaaaatcgcctgagatacagatgaagattagaaatcgcgacacatttgtagtcattgtatcacggattacaatgaacgcagtgcagagccccaaagctcaggctattgttaaatcaataatgttgtgaagtaaaacaatcagtactgagaaacctggtttgccacagaacaaagacaagaagtatacactaacttgtataaatttatctaggaaaaaaatccttcagaattctaagatgaatttaccaggtgagaatgaataagctatgcaaggtattttgtaatatactgtggacacaacttgcttctgcctcatcctgccttagtgtgcaatctcatttgactatacgataaagtttgcacagtcttacttctgtagaacactggccataggaaatgctgtttttttgtactggactttaccttgatatatgt

SEQ ID NO: 506 - DNA, 212 bp, Homo sapiens
cattcctagccgagtgtgacacagtggagcagaacatctgccaggagactgagcggctgcagtctacaaactttgccctggccgagtgaggtgtagcagaaaaaggctgtgctgccctgaagaatggcgccaccagctctgccgtctctggatcggaatttacctgatttcttcagggctgctgggggcaactggccatttgccaattttcc

SEQ ID NO: 507 - DNA, 433 bp, Homo sapiens
gccagcgctctgacatgcagaaggtgaccctgggcctgcttgtgttcctggcaggctttcctgtcctggacgccaatgacctagaagataaaaacagtcctttctactatgactggcacagcctccaggttggcgggctcatctgcgctggggttctgtgcgccatgggcatcatcatcgtcatgagtgcaaaatgcaaatgcaagtttggccagaagtccggtcaccatccaggggagactccacctctcatcaccccaggctcagcccaaagctgatgaggacagaccagctgaaattgggtggaggaccgttctctgtccccaggtcctgtctctgcacagaaacttgaactccaggatggaattcttcctcctctgctgggactcctttgcatggcagggcctcatctcacctctcgcaagagggtctc

SEQ ID NO: 508 - DNA, 442 bp, Homo sapiens
ctcagcgagcactgagctggccctacttccaggatggatgcatcacactcaaggacaggagcctggtccttccctgatggcctttggacccagggcctgacttgagccactccttccttcaggactctgcgggaggctggggccccatcttgatctttgagcccattcttctgggtgtgctttttgggaccatcactgagagtcaggagttttactgcctgtagcaatggccagagcctctggcccctcacccaccatggaccagcccattggccgagctcctggggagctcctgggacccttggctatgaaaatgagccctggctcccacctgtttctggaagactgctcccggcccgcctgcccagactgatgagcacatctctctgccctctccctgtgttctgggctggggccacctttgtgcagcttcgaggacagg

SEQ ID NO: 509 - DNA, 536 bp, Homo sapiens
aatctgaagattaaccatttttttgtcttagaatatcaaaaagaaaaagaaaaaggtgttctagctgtttgcatcaaaggaaaaaaagatttattatcaaggggcaatatttttatcttttccaaaataaatttgttaatgatacattacaaaaatagattgacatcagcctgattagtataaattttgttggtaattaatccattcctggcataaaaagtctttatcaaaaaaaattgtagatgcttgctttttgttttttcaatcatggccatattatgaaaatactaacaggatataggacaaggtgtaaatttttttattattattttaaagatatgatttatcctgagtgctgtatctattactcttttactttggttcctgttgtgctcttgtaaaagaaaaatataatttcctgaagaataaaatagatatatggcacttggagtgcatcatagttctacagtttgtttttgttttcttcaaaaaagctgtaagagaattatctgcaacttgattcttggcaggaaata

SEQ ID NO: 510 - DNA, 325 bp, Homo sapiens
atatgtattcattcactttcaagatttgttttggtgtcaaaataacatgaaaaggtagatggagttgcttctgttgaattagctctgccaccaatatgtatcttcatacacgtttggaaatgtttcctgcagcattaggtatgacttgttctgagtactgcttccggtgctaaaatgaacaaagaatttgtacttaatggcatggactctggagaatctatgcgaatcaacctttctaccttaatatctccccaaaaatgtatagtgccttgtttttatgtacagtttatatacagaaaagtttgctctgcatttttgatgatgg

SEQ ID NO: 511 - DNA, 555 bp, Homo sapiens
tgggaggccctgtaagagcctggtgaaatgggagagtgagaataaaatggtctgtgagcagaagctcctgaagggagagggccccaagacctcgtggaccagagaactgaccaacgatggggaactgatcctgaccatgacggcggatgacgttgtgtgcaccagggtctacgtccgagagtgagtggccacaggtagaaccgcggccgaagcccaccactggccatgctcaccgccctgcttcactgccccctccgtcccaccccctccttctaggatagcgctccccttaccccagtcacttctgggggtcactgggatgcctcttgcagggtcttgctttctttgacctcttctctcctcccctacaccaacaaagaggaatggctgcaagagcccagatcacccattccgggttcactccccgcctccccaagtcagcagtcctagccccaaaccagcccagagcagggtctctctaaaggggacttgagggcctgagcaggaaagactggccctctagcttctaccctttgtccctgtagcctatacagt

SEQ ID NO: 512 - DNA, 513 bp, Homo sapiens
ttccttgttttggcttcttttcagaatgccgggagagtacatgcagggattccatctaatcaccctcagcactctttctctggtcctgctggatagatttagatttcctttctttttttagggcctcagtctgctatctcctttggtggctaccaccactcactcccttgatatcttctactcccttgccttcaccttgcttaagactgagaagggagttagattttgtcactagctcttctttttcctcactgtgtaccccaccaaacaagattagttcaagttaaaaagaacctactggaggtaaactgggagagcaagtgttggatctgggctggtccctttcccataaaattaggtccctggttgtatgttcccatagcaccccatacttcctctctcagaataatcatttcccttgtaatgctcagcatccgcatcctgcttgactgcaaacttgctgaaggtagggactgtttgtcttggacttcgctgccagtccttagaacagtg

SEQ ID NO: 513 - DNA, 519 bp, Homo sapiens
  misc_feature (46)..(46): n is a, c, g, or t
  misc_feature (117)..(118): n is a, c, g, or t
ggaatttgcaccatcatgtttcagtgaagatgctgtaaataggttnagattttactgtctatggatttggggtgttacagtagccttattcacctttttaataaaaatacacatgannacaagaaagaaatggcttttcttacccagattgtgtacatagagcaatgttggttttttataaagtctaagcaagatgttttgtataaaatctgaattttgcaatgtatttagctacagcttgtttaacggcagtgtcattcccctttgcactgtaatgaggaaaaaatggtataaaaggttgccaaattgctgcatatttgtgccgtaattatgtaccatgaatatttatttaaaatttcgttgtccaatttgtaagtaacacagtattatgcctgagttataaatatttttttctttctttgttttattttaatagcctgtcataggttttaaatctgctttagtttcacattgcagttagccccagaaaatgaaatccgtgaagtcacattccacatc

SEQ ID NO: 514 - DNA, 563 bp, Homo sapiens
agagcttcctgatctgggtgaatgaggaggatcatacacgggtgatctccatggagaagggtggtaacatgaagagagtgtttgaaagattctgccgaggcctcaaagaggtggagagacttatccaagaacgtggctgggagttcatgtggaatgagcgtttgggatacatcttgacctgtccatctaacctgggcactggacttcgggcaggagtgcacatcaaactgcccctgctaagcaaagatagccgcttcccaaagatcctggagaacctaagactccaaaaacgtggtactggaggagtggacactgctgctacaggcggtgtctttgatatttctaatttggaccgactaggcaaatcagaggtggagctggtgcaactggtcatcgatggagtaaactatttgattgattgtgaacggcgtctggagagaggccaggatatccgcatccccacacctgtcatccacaccaagcattaactccccatcgccagctgatgactcaagattcccaggagttttgctcattctaatgatggcccattctacttgctc

SEQ ID NO: 515 - DNA, 549 bp, Homo sapiens
  misc_feature (76)..(76): n is a, c, g, or t
aaactactaaccactgcaagctcttgtcaaattttagtttaattggcattgcttgttttttgaaactgaaattacntgagtttcattttttctttgaatttatagggtttagatttctgaaagcagcatgaatatatcacctaacatcctgacaataaattccatccgttgttttttttgtttgtttgttttttcttttcctttaagtaagctctttattcatcttatggtgcagcaattttaaaatttgaaatattttaaattgtttttgaactttttgtgtaaaatatatcagatctcaacattgttggtttcttttgtttttcattttgtacaactttcttgaatttagaaattacatctttgcagttctgttaggtgctctgtaattaacctgacttatatgtgaacaattttcatgagacagtcatttttaactaatgcagtgattctttctcactactatctgtattgtggaatgcacaaaattgtgtaggtgctgaatgctgtaaggagtttaggttgtatgaattctacaaccctataata

SEQ ID NO: 516 - DNA, 443 bp, Homo sapiens
agaagtctcagctaagctcacgtcctgagaaagctcaaaggtttggaaggagcagaaaacccttgggccagaagtaccagactagatggacctgcctgcataggagtttggaggaagttggagttttgtttcctctgttcaaagctgcctgtccctaccccatggtgctaggaagaggagtggggtggtgtcagaccctggaggccccaaccctgtcctcccgagctcctcttccatgctgtgcgcccagggctgggaggaaggacttccctgtgtagtttgtgctgtaaagagttgctttttgtttatttaatgctgtggcatgggtgaagaggaggggaagaggcctgtttggcctctctgtcctctcttcctcttcccccaagattgagctctctgcccttgatcagccccaccctggcctagaccagcagacagagcca

SEQ ID NO: 517 - DNA, 516 bp, Homo sapiens
aatgatggaatgttgactgtgtttggcacacaggacacggaccttcatggaagtccttgctctgcgtggcatctgtcagcttttcacctttcattcttattcttcacttttgctgctgagcctagctgtacaaacttgcactttcatttgctaatataaattcagttttattttaccattttagagactactaatgattaaatgtagaaggagagggtgcacatgtttttatgtggagtgtttaaaagataaatttataccactgtaatgtgcagcttttattaaaagagaaattggttgaactgctaggttgaatgagagacttcatctattggactattttttttaatccaggcatatggtctttagtaatggcttgtaatttgtgaaaacattaatttgggggttttccctgttttcagttgtccatgtacacatagtcattatattagaaaagaaagctgttcaacaaacttgtttaatttgtttaaatcaacatagcatgaaacaccaaat

SEQ ID NO: 518 - DNA, 516 bp, Homo sapiens
gtagtgtatcactgagtcatttgcagtgttttctgccacagacctttgggctgccttatattgtgtgtgtgtgtgggtgtgtgtgtgttttgacacaaaaacaatgcaagcatgtgtcatccatatttctctacatcttctcttggagtgagggaggctacctggaggggatcagcccactgacagaccttaatcttaattactgctgtggctagagagtttgaggattgctttttaaaaaagacagcaaacttttttttttatttaaaaaaagatatattaacagttttagaagtcagtagaataaaatcttaaagcactcataatatggcatccttcaatttctgtataaaagcagatctttttaaaaaagatacttctgtaacttaagaaacctggcatttaaatcatattttgtctttaggtaaaagctttggtttgtgttcgtgttttgtttgtttcacttgtttccctcccagccccaaaccttttgttctctccgtgaaacttaccttt

SEQ ID NO: 519 - DNA, 379 bp, Homo sapiens
  misc_feature (170)..(170): n is a, c, g, or t
aatgcgaaggctaagtgtcaccccctttctctgcctctggctgggccttgctaagggccaaggaaagaaagacattttttagggggcagccagtccaaatgccaaaagaagaccagttcttgccctgattgtatgaaatttgacattttggcactttttttttttttttnggccaatcagattttctatgttctaaggacatggctgctgtagaatagcacagacgtggatgataaattatccccagaagcagcatgacagaatgcctcggggagcacttggaagggaaattgcagttctgttgaaatagaggaaaatcccttggtaaagacacagcctgttaggctcgtgtgggcctccagtatgttcaccaggggaa

SEQ ID NO: 520 - DNA, 466 bp, Homo sapiens
agtagtgcctgtggtttagcccaccaatcttgatgactaaaagtagctgatgcattgtgcatatgatgcttgagatggtttttgcaaaagcagaaatcgctgcaaggtaatcacaatagataaaagtggtattttaaacctttgaaataaatggatgtaactgtaccttggtacagcttttcacttgtttagtttttaaacgttagtataatctgaataaataaaatgttgccaaattcaatgtagaaagaatgtgacaacacaccttgggtagttctgcttgtgtttttgcatattgtaaaagcagtgtcacagctaaaaagaaagaaatcgtttctaacagtaaattattgtgctttagttgctagtttgtactgagagttgacctctccctgtgcagttttttgttctaaacttgtataaataacaattgtgtaatgtgtctccctcctacattgtaacaatt

SEQ ID NO: 521 - DNA, 547 bp, Homo sapiens
tggggacttgtggatcattccttcctccctgcaggagcttcccaagctggtcacagagtctcctgggcacaggttatacagaccccagccccattcccatctactgaaacagggtctccacaagaggggccagggaatatgggtttttaacaagcgtcttacaaaacacttctctatcatgcagccggagagctggctgggagcccttttgttttagaacacacatccttcagcagctgagaaatgaacacgaatccatcccaaccgagatgccattaacattcatctaaaaatgttaggctctaaatggacgaaaaattctctcgccatcttaataacaaaataaactacaaattcctgacccaaggacactgtgttataagaggcgtgggctcccctggtggctgaccaggtcagctgccctggccttgcacccctctgcatgcagcacagaagggtgtgaccatgccctcagcaccactcttgtccccactgaacggcaactgagactgggtacctggagattctgaagtgcctttgctgtggt

SEQ ID NO: 522 - DNA, 502 bp, Homo sapiens
gcatcaggctaagaccctgtgtcctccaccatgcactcacccctagccctggttagctgacagtcagctgtggggaacacagctacaaccctaccctggcagggacctgagagcatctcaggaggggcagcgcatgtgtgcatgtgctgtgtgagtgagcacacccgtgtgcacactcatacacatgtgcacacacacgcactctccccgctcaggggcctggaggtctggctgagcccctggggaaaggtgagttctttcatctccctcctccaggtcggagtgcctggagtcaggtgtcgaggccacattgctggctgccccctctttgtagctcctataaagggcccacacctggtggatacctggttgagcgtgtggtctctgccccagcctgtccttgtcacgatcacaggccttgcttttgtaacaatgatgaccccggcctgtctcatcttctgaagaggaaaagtcaaagtgttgctgtggctccatatttcaa

SEQ ID NO: 523 - DNA, 387 bp, Homo sapiens
gtgatagacacttcgggtggacccctcgacctcatggcttgcagagtggttgcggccagcacccgggagatggcgatgctcatagctcaggccttacagacgattaactatgggcgggatgatgagaagtgactgcggctgaggcaaagctgctcccaaggcctccctgggctgctgtgggctcctggggaggtggccctcgtggcccacgctccatgccagtggctcacgctctgctcctggctaccccagagggagttgtcacgctacagtgagtggctggccttttaaatcgacgtctctctcaccaggatttggtgtttagctgtttctctctttaatctcacgtagcctttttcaggttagtacgtgttcttctgtcagggc

SEQ ID NO: 524 - DNA, 320 bp, Homo sapiens
gtgaattttccatgaatgtttttaatattctcatctcaacattgtgatatatgctactaaaaaccttttcatatacatcttacctcatttcaagtgaattattttaatctttttctctctttccaaaaatttacaggaatgtttagtgtaattggatttcgctatcagttcccatccttaagttttgatattcaatatctgatagatacactgcatctttggtcatctaagatttgtttacaaatgtgcaaattatttagagcatagactttataagcattaaaaaaaactaatggaggtaaaacctaaatgcgatgtga

SEQ ID NO: 525 - DNA, 543 bp, Homo sapiens
ccaggactacagaataccatcccctggtaccgtgtagttgccgaagtccagatctgccatggcaaaacggaggctgtgggccaggtccacatcttcttccaggatgggatggtgacgttgactccaaacaagggtgtgtgggtgaatggtctccgagtggatctcccagctgagaagttagcatctgtgtccgtgagtcgtacacctgatggctccctgctagtccgccagaaggcaggggtccaggtgtggcttggagccaatgggaaggtggctgtgattgtcagcaatgaccatgctgggaaactgtgtggggcctgtggaaactttgacggggaccagaccaatgattggcatgactcccaggagaagccagcgatggagaaatggagagcgcaggacttctccccatgttatggctgatcagtcatccaccaggaacgaagatttcctgaagaagacctggtccctctggaggttgcggtggctgaaggatgcatcatgtgctcctaccctgctctaccgcttttctgggtcacagag

SEQ ID NO: 526 - DNA, 541 bp, Homo sapiens
tcatcacttccttctggttttatgtatttgtagactatgcagcttttcattaaactgcaagtatatacaagacagatctgaaattaggcctgagtgttccgatccaccactgtactagtaaataaaaatccacctaccttttatgtggaaaattatgtgctattgagtaacttttagctcttttttaaaaaatgggtgaaatttaagtgtcttttttatgagaatgacacatgaagagatctgagagcaatctcatgtagtcttccatgaacctgcaattgtttggtatgcgtcagcattttccaatttccaggttggatctagagctgctgttgatcactcaggcatactaatggattcatttagatgggtccaagctgcagtccatgagcaataacagactaccccagatactgcagtttacgcagtgcttagtaaatgagatttgtggaactaagttattagttacctgaggcttcttaagaaagtcttcttttttgaccagttgatgtgaaagagggagcatgtgacacagccagta

SEQ ID NO: 527 - DNA, 543 bp, Homo sapiens
gacagtttgacttgaatgcaacagcaggaaaattttgcaagttacataattgtatatacagtaggttttcttaagtctcttcggttcatcctttgtaatttgtgtgtgtatctgtagtattgcaggcttttggagactattcttacaggcagtatgtcagtcatcaaagaaaatgctgtcacctgccattgttgtatttgtgggtatttatagttgtatgtatgtaaatgcatcagtgtgtagattgcatatcagtgtatggtacatgtacatcaaaattatttttgtccttaatcagtgtgatatgaaaagcaagtacaacctcataggactgattatataatgaagttgttgagagtatatatagtggtattgttttattaaacttaaactcaaataatattttgattaaaatttttaataagactttatgctagaaaattctttgagctttgaatcaccagggcaaaaatgactttcaactaaccttgtgaatcttttgcagtgtactgtgtgcaataccaagggcatagctccctgtaa

SEQ ID NO: 528 - DNA, 520 bp, Homo sapiens
tcccagcaacaaactcctcatgataactgcacacaatctgaaaaccactgaaggacaagccaaccacagcagccaagcccactccttgcagcatgggtactggtggcacaccagacagtgacactgccccacaaaggcctgggcccgtgggggctgctgcctggcatgacatctctccagatttctggcttaaaaccaactttccatccgagaagcctcctcagtagttactctgctcatgagacagatctgggctccaagccaggaaaggtgaacagaaaccacaagtgtccagccctcggtgctggagtggacgttaattgtcagccaccagactgtcccggcacctacagagaatgtttcacagttctggcatttaaatcctttgatagtggattgtgctgctgttagccttagtttcagtgctttacaagtctcgcttattatctcattggtatttaggtatacaaaacagttgattattcaccacgccaatatctgggtctctgtatctcatgta

SEQ ID NO: 529 - DNA, 358 bp, Homo sapiens
aaatgaaaagtccaccttgtcttctctcagaaaacctttgttgttcattgtttggccaatgaatcttcaaaaacttgcacaaacagaaaagttggaaaaggataatacagactgcactaaatgttttcctctgttttacaaactgcttggcagccccaggtgaagcatcaaggattgtttggtattaaaatttgtgttcacgggatgcaccaaagtgtgtaccccgtaagcatgaaaccagtgttttttgttttttttttagttcttattccggagcctcaaacaagcattataccttctgtgattatgatttcctctcctataattatttctgtagcactccacactgatctttgga

SEQ ID NO: 530 - DNA, 451 bp, Homo sapiens
gacaagctacgtggagcctggttcaggtccttttagtgagtctaccattaccatttccctgtatattccctctgaacagcaatttgatccacccaggcctttagagtcagatgtcttcattgaagatagagccgaaatgactgtgtttgtacggtctttcgatggattttctagtgcccaaaagaatcaagaacaacttttgacattagcaagcattttaagggaagatggaaaagttttcgatgagaaggtttactacactgcaggctacaacagtcctgtcaaattgcttaatagaaataatgaagtgtggttgattcaaaaaaatgaacccaccaaagaaaacgaatgagaaaaatgaaaggaagttctgctgtcagaggcaaaacatctgtttatcatagacatcaacatgacctataagtaaagtgcgtgtctagtgtcttctatt

SEQ ID NO: 531 - DNA, 440 bp, Homo sapiens
gactcccgagggctagggctagagcagacccgggtaagtaaaggcagacccagggctcctctagcctcatacccgtgccctcacagagccatgccccggcacctctgccctgtgtctttcatacctctacatgtctgcttgagatatttcctcagcctgaaagtttccccaaccatctgccagagaactcctatgcatcccttagaaccctgctcagacaccattacttttgtgaacgcttctgccacatcttgtcttccccaaaattgatcactccgccttctcctgggctcccgtagcacactataacatctgctggagtgttgctgttgcaccatactttcttgtacatttgtgtctcccttcccaactagactgtaagtgccttgcggtcagggactgaatcttgcccgtttatgtatgctccatgtctagcccat

SEQ ID NO: 532 - DNA, 225 bp, Homo sapiens
aagcagtcgaccgcacttatggtaatcagttttgtataacttaaaataattaaataaatgaataaatccaaaacaaacatgcagtacttttgttgtatgggattggtgggctgatttacatgtatggttactaaaaagtaccagcatgttaactttattacaatttgtattactttctctgtagttcctaatggattcaattacggactctggatatttgcactt

SEQ ID NO: 533 - DNA, 436 bp, Homo sapiens
tcctgatgtgccagaacttcgaccctttctctgagagagatgatcgtgcctataaatagtaggaccaatgttgtgattaacatcatcaggcttggaatgaattctctctaaaaataaaatgatgtatgatttgttgttggcatcccctttattaattcattaaatttctggatttgggttgtgacccagggtgcattaacttaaaagattcactaaagcagcacatagcactgggaactctggctccgaaaaactttgttatatatatcaaggatgttctggctttacattttatttattagctgtaaatacatgtgtggatgtgtaaatggagcttgtacatattggaaaggtcattgtggctatctgcatttataaatgtgtggtgctaactgtatgtgtctttatcagtgatggtctcacagagccaactcac

SEQ ID NO: 534 - DNA, 127 bp, Homo sapiens
agataccccgaagccatggcaagcaagggcttgcaggacctgaagcaacaggtggaggggaccgcccaggaagccgtgtcagcggccggagcggcagctcagcaagtggtggaccaggccacagagg

SEQ ID NO: 535 - DNA, 517 bp, Homo sapiens
ataaaatgtctacgtctttctccagtttctgagccctatgcacattggcttgtgggcttgttcttcctgccaaatgatcagagagggaacattccatttatttgtagtggatttcctctggagggcatgtacccacactaaataccaactgctcttcctcagctgtagtccccaacatcagacttggcacgtggtggacactaacacacaggcactcaatgaatgagtgaaggaaataaaagtcaccccccgttggtgagaaggtgcctatccccctgagtcctcagtgcaggaccagtggatgaaaggcaaggtaaagaggcccaagataggctggcttcccccgttcaaggtatagtctgcctttaagggagttttagaaccaacatgcaagacattgaaagaaatcttgcaagagccattattgacttagatccaaaacagcctctctcatgtctaaaaaggcacagaattttgcagatctgaggaagagggatgcattacctttttgcttctt

SEQ ID NO: 536 - DNA, 512 bp, Homo sapiens
  misc_feature (30)..(30): n is a, c, g, or t
  misc_feature (34)..(34): n is a, c, g, or t
  misc_feature (473)..(473): n is a, c, g, or t
gttgtcgcagccggggaagggaagctaccnagcnatctagtgcgtagaggtcatggacgccgttaaacatcctacagtgcaagcgcagcccccgaccacgaagagttgtcttgctcaaatatcaacagtgctgcagtgtagaaacttgatcgttggttttcttttaatgcaaaactctcataaaaacctttcacttttcctgtcattgattatatgcttgatacacccaaaaagaaaaggggaggggcaccaattcacctacactccagtggctccatcacctttaaaaatatttataaaatagttccaaaaatctgatatctgaaaagcaatccaagcctgtgtaaatgggaatcactgataagtatcatcatctgtatcagcttggcttggacatgaaaaattgattctctttatgtcactccttgcacctggacaaattcaatccccggtacttaagtcacactgccaanccctcggccctgactattgtcttgattgctgttcctttc

SEQ ID NO: 537 - DNA, 245 bp, Homo sapiens
ctgtcacaaatagcagcaccactttggattgattttgctctccaggacatcagcacatggccctgatcagcactaccacatccaaacataagtcactgaaaaacacttaatatttatgagttggtaatgacaagggacattgtataaagtactatttgctagattcatgcctcaaaagttattataaacagacctttattaaacacatcttgaaagatgtagaagtccctctatagtctagtata

SEQ ID NO: 538 - DNA, 435 bp, Homo sapiens
caacgtctaactggacttcccaagataaatggtaccagcgtcctcttaaaagatgccttaatccattccttgaggacagaccttagttgaaatgatagcagaatgtgcttctctctggcagctggccttctgcttctgagttgcacattaatcagattagcctgattctcttcagtgaattttgataatggcttccagactctttgcgttggagacgcctgttaggatcttcaagtcccatcatagaaaattgaaacacagagttgttctgctgatagttttggggatacgtccatctttttaagggattgctttcatctaattctggcaggacctcaccaaaagatccagcctcatacctacatcagacaaaatatcgccgttgttccttctgtactaaagtattgtgttttgctttggaaacacccactcact

SEQ ID NO: 539 - DNA, 498 bp, Homo sapiens
caggaggccatgactacatcacagccaggcggcattccctgccacagtggcggcttgaatcatcaagaaatggataaatggggctttagtaaatcaggcttgcaggctcaaagctgcaatctgcccactctcaggtactgagactttgtgggcctcagacaccaggaagaaagttgggatacagtcatttgagttaaaaagggaatgacccctcagaaacccacattagcagtgttactcttggaactgcctttacttttaacgctctctgttctgaaaaagaggtgtttggttacgtgtgagccaacatcacgttttgttagctgtgatttacctttgtccgtttaaaagacttcacggagccattctgtatacaaggtgtgctctttccaatgtagaaggggttatggaaaagggtgcgatcctttgctgtaaactggagagaccagtcccaaacagaggggaattttaagcccttctcatcacccaattggatgt

SEQ ID NO: 540 - DNA, 474 bp, Homo sapiens
cctgaggggcctcttatgggctgggttctacccaggtgctaggaacactccttcacagatgggtgcttggaggaaggaaacccagctctggtccatagagagcaaaacgctgtgctgccctgcccaccctggcctctgcactcccctgctgggtgtggcgcagcatattcaggaagctcagggccctggctcaggtggggtcactctggcagctcagagagggtgggagtgggtccaatgcactttgttctggctcttccaggctgggagagcctttcaggggtgggacaccctgtgatggggccctgcctcctttgtgaggaagccgctggggccagttggtcccccttccatggactttgttagtttctccaagcaggacatggacaaggatgatctaggaagactttggaaagagtaggaagactttggaaagacttttccaaccctcatcaccaacgtctgtgccatttt

SEQ ID NO: 541 - DNA, 437 bp, Homo sapiens
tggcactcggtggcagtcaccataaaacaacacatcctgcacctggaactggacacagacagtagctacacagctggacagatccccttcccacctgccagcactcaagagccactacaccttggaggtgctccagccaatttgacgacactgaggatccctgtgtggaaatcattctttggctgtctgaggaatattcatgtcaatcacatccctgtccctgtcactgaagccttggaagtccaggggcctgtcagtctgaatggttgtcctgaccagtaacccaagcctatttcacagcaaggaaattcaccttcaaaagcactgattacccaatgcacctccctccccagctcgagatcattcttcaattaggacacaaaccagacaggtttaatagcgaatctaattttgaattctgaccatggatacccatc

SEQ ID NO: 542 - DNA, 428 bp, Homo sapiens
atctctgcctgtgcttatccagataagaagaccaaaatcccgctgggaaaaacccaggccttgacattgttattcaaatggcccctccagaaagtttaatgatttccatttgtatttgtgttgatgatggaccacttgaccatcacatttcagtattcatagatgactgtcacattttaaaatgttcccacttgagcaggtacacaactggtcataattcctgtctgtgtaattcgatgtatatttttccaaacatgtagctattgtttgctttgatttttgcttggcctcctttatgatgtgcatgtccttgaaggctgaatgaacagtccctttcagttcagcagatcaacaggatggagctcttcatgactgtctccagcaataggatgatttactataaatttcatccaactacttgtgatctc

SEQ ID NO: 543 - DNA, 259 bp, Homo sapiens
atgttttgctaatgctcgtatctccttgattacataatgttagtagcactgagacccccatggtaatgtaacttaattataagctatgtcactaccctcctgtaaaatactattggacagacacagagggacccttggctcctgtgtctggtccacacaccacagaagcttgtattatcagtgaatataaatgtactacatttgcatgccttttgggtttgccttaattcttacctcatttgcatcctatcgatctgga

SEQ ID NO: 544 - DNA, 446 bp, Homo sapiens
taacaggcaccttatctactcattagtgaagagataattggattacacaggcaggcttgtttactacatccagaatgtagaaactgctttcttcaacatcttggttctagctagtaataacaatataattctttggcagatattcagaataacattttaaactacattttcttagaaaattgcattcttgtagtgagcagtgtatggtctcttttgttcagaatttaaaactgataaccaatgaaagccttttctcttattcctctaccgtcatttacatgataatctgaagctaatatgacaatatttaaatactaagtggtactagggaactacaagaatactgtaaagcttaagccattgttatcactgtcatttagcatttaataacaaaactatacagaattatgtgcataccaatgaatgttttgtaccatctagttaaa

SEQ ID NO: 545 - DNA, 563 bp, Homo sapiens
ccatagcaacaagtgacctgcccctcagactcaagatcccagataccagagctggaggagtcatagggcattactggtaggcaggaaaactgagggtcgaacaaatggaagaatgcggtgatcatagaccaaagacacacagataattaaccccatgtgtccacccaggccaaagttcttcctgctaccccacagtggatgtccaggcagatggtccccacatgatggggaagcagagggcatagtgtggttttgtgggacttgttcatgttttgtagtgtgggctcaacagtgccaaaggaaacactagggaaaagttggtgaaacatgccagctagcaggaccagtaaaggcataatcaggcatttggcaaagcttgcttttctaattcaatgataggttctaataggaaatttttgaagattttttaaaacaatgttatagtggcacttccccagtatggaataaataacatgcattcttttttcaatatactgtcatattcagatgtcattaaaataaatggatgagtcacagaggagctatcagatgctctcatgact

SEQ ID NO: 546 - DNA, 484 bp, Homo sapiens
tatgtgacgctggaccttttctttacccaaggatttttaaaactcagatttaaaacaaggggttactttacatcctactaagaagtttaagtaagtaagtttcattctaaaatcagaggtaaatagagtgcataaataattttgttttaatctttttgtttttcttttagacacattagctctggagtgagtctgtcataatatttgaacaaaaattgagagctttattgctgcattttaagcataattaatttggacattatttcgtgttgtgttctttataaccaccgagtattaaactgtaaatcataatgtaactgaagcataaacatcacatggcatgttttgtcattgttttcaggtactgagttcttacttgagtatcataatatattgtgttttaacaccaacactgtaacatttacgaattatttttttaaacttcagttttactgcattttcacaacatatcagacttcaccaa

SEQ ID NO: 547 - DNA, 402 bp, Homo sapiens
acatttgatagtttttcaccccttggctttattttatataaacttttgtttttcagcagttctgaactttttagtattttataaatggtccaaaaaatgcctgtttcagaagtttttgaattcagtgcatttcctcttgatttgtctgggttaaaaccattccttttgtatgaaatgttttgacttaggaatcattttatgtacttgttctacctggattgtcaacaactgaaagtacatatttcatccaaatcaagctaaaatttatttaagttgattctgagagtacaggtcagtaagcctcattatttggaatttgagagaagtataggtgatcggatctgtttcatttataaaaggtccagtttttaggactagtacattcctgttattttctgggtt

SEQ ID NO: 548 - DNA, 503 bp, Homo sapiens
agttagaacatttgctgtcagccacatattgagatgacactaggtgcaatagcagggatagattttgttggtgagtagtctcatgccttgagatctgtggtggtcttcaaaatggtggccagccagatcaaggatgtagtatctcatagttcccaggtgatatttttcttattagaaaaatattataactcatttgttgtttgacacttatagattgaaatttcctaatttattctaaattttaagtggttctttggttccagtgctttatgttgttgttgtttttggatggtgttacatattatatgttctagaaacatgtaatcctaaatttaccctcttgaatataatccctggatgatattttttatcataaatgcagaataatcaaatacattttaagcaagttaagtgtcctccatcaattctgtattccagacttgggaggatgtacagttgctgttgtgtgatcaaacatgtctctgtgtagttccagcaaatca

SEQ ID NO: 549 - DNA, 440 bp, Homo sapiens
  misc_feature (331)..(331): n is a, c, g, or t
ggactagagcaacatcgtgctgcccaaaggactaacctatgcaaactagttcacattttagtggatgtcgcagttaatgtgtaataagacattatttcccctgcataatgtacaacagcattgaaatgacacattaagcctagcatcacattgtatagtacagtcactcacaaacccttcaaggctaccctaatcattaacattaatatttgtttaaaagcaaatcaccgatttatctattgaaactacttaaatgacggcaaaccaggaatgacagatggctgtgtcagcaatggctttaatgtgttccctgcaagtggtctcctatgantagaactgcgttctcaaatgcactctcttcagggtcttaatattctgtgttttctctctgtatttgtaaaacattataacacattaatttcctatctctacacatttgg

SEQ ID NO: 550 - DNA, 505 bp, Homo sapiens
gtcaaggcattgtatgttgcttctgtggttattattctgtgatgcttagactacttgaacccataaacttggaagaatctttgagcaaattttctcagttgtctgtatgacttcagtatattcctgggaatgccataggattttttgtgcttgatacatggtatccagtttgcatagtatcacttctttgtaatccagttgctgttaagaatgatgtactttaaaggaaaagagaaaactgcatcacagtcccattctccagtgtccatgcaatgaattgctgagcatttaggaagcagcaccaagtctattacaggcatggtgtgaaacttgatgtttgacctgtgatcaaaattgaaccattgtacagtttggcttctgtttgcttcaaaatatgtagaattgtggttgatgattaatttgcgagactaactttgagagtgtaacagttttgaagaaaacattgaatgttttacaaatgaaggggcttcacggaatgttacaa

SEQ ID NO: 551 - DNA, 476 bp, Homo sapiens
ccaaatttcatttcagccacttctgcaggatccctactgccaacctggaatggagacttttatctacttctctctctctgaagatgtcaaatcgtggtttagatcaaatatatttcaagctataaaagcaggaggttatctgtgcagggggctggcatcatgtatttaggggcaagtaataatggaatgctactaagatactccatattcttccccgaatcacacagacagtttctgacaggcgcaactcctccattttcctcccgcaggtgagaaccctgtggagatgagtcagtgccatgactgagaaggaaccgacccctagttgagagcaccttgcagttccccgagaactttctgattcacagtctcattttgacagcatgaaatgtcctcttgaagcatagctttttaaatatctttttccttctactcctccctctgactctaagaattctctcttctggaatcgcttg

SEQ ID NO: 552 - DNA, 493 bp, Homo sapiens
aggaaataacccagttctgcaccactggtttttgtagctatctcgtaaggctgctggctgaaaactgtgtctatgcaaccttccaagtgcggagtgtcaaccaactggacgggagagagtactgctcctactccaggactctcacaaagctgatgagctgtacttcagaaaaaaataataatttccatgttttgtatatatctgacaaaactggcaacatcttacagactactgacttgaagacaacctcttttatatttctctatttctgggctgatgaatttgttttcatctgtcttttcccccttcagaattttccttggaaaaaaaatactagcctagctggtcatttctttgtaaggtagttagcaattttaagtctttctttggtcaacttttttttaatgtgaaaagttaggtaagacacttttttactgcttttatgtttttctgtcttgttttgagaccatgatggttacacttttggttccta

SEQ ID NO: 553 - DNA, 481 bp, Homo sapiens
cctcttggtgcctaacctggattagtaatgtgcattcaggtgaattttcagctgaggctctgagaactggtactctcagtgtgttctggtcatcttgtggcttagttgtagaagcaggtgtgtctcttgcctctgcttgcctcctactgcacactcagcacccaggactggaatcaccgactactgaatctcctacatgtattgctgctacttcaagctcctccacttgaaaccttatgattttccaaggggagatgggacagtgtcatctaaatattccgaatgtttggccttctgagaaaagagcttctagtaattgaaccatgggtttcccagcttctggagggttggccgtgggctgtgtacatgtgtgtgcccaggggtgagtgtttctcaggattcctaacgattcaaattaccgttgagtatatataaagaatcgagtctctgtatggaagaacaaatgtgtgcattcaccccc

SEQ ID NO: 554 - DNA, 377 bp, Homo sapiens
ttgaaagttgtgggtcagctgaccaggtagaggattcaagactcaatgtggaaaaaatattttaaactactgattgaatgttaatggtcaatgctagcacaatattcctatgctgcaatacattaaaataactaagcaagtatatttatttctagcaaacagatgtttgttttcaaaatacttctttttcattattggttttaaaaaagcattatccttttatctcacaaataagtaatatctttcagttattaaatgatagataatgcctttttggttttgtgtggtattcaactaatacatggtttaaagtcacagccgtttgaatatattttatcttggtagtacattttctcccttaggaatatacatagtct

SEQ ID NO: 555 - DNA, 482 bp, Homo sapiens
gagctgactgacatatctttaaatactttgtactaactttatcacacttactgtgtcatagaatatcatacagtttatacgctcatagttctcttgtgaacacttcaaacatcgctaagcatttgatctggccatgtatatggtagctgtgttttaatttgagaatcttgagggtagagccacaaatttcaattcttacatttccatttgcaaagtgactagagaaaaagaaatcagcttaaatgaggtattaagtaatgtttagagttgtaggtattaactagaatataaatccttagaaattgtctttataccttcaaaaattatactatgcatttatcatagaaatgtgattacaaagaagtctgactaccatgtctttaaacatatggcatctctcaacttttcttccttatggggctacatttgttcatttccagcagtagcataaacttacggtgacatggtagacttgtctctaa

SEQ ID NO: 556 - DNA, 515 bp, Homo sapiens
  misc_feature (89)..(89): n is a, c, g, or t
  misc_feature (110)..(110): n is a, c, g, or t
  misc_feature (227)..(227): n is a, c, g, or t
  misc_feature (250)..(250): n is a, c, g, or t
  misc_feature (276)..(276): n is a, c, g, or t
aattgccacattttcttatggcattaaaaattttacaaaaacataattttaatggctatattatattccatttaatggatgcaactcangtttatttaaccattcccatngttgttaactatttaggttgtttctaattttcattattataaagttgcagaaatttggtgtacataaaactgtctccatataattgattattaggatatattcccatgaaggattcntttttttaaaaaaatgtgaaatntcatcttgtacttacacctttcatgnaaagggatttcctgcttttgtactgcatgggtggcagttgtgaggaaaagccagtcaaatgacctttttacaaaagaaatgcagtggtcacttcagttgagagtgactttttaatacaacaagatcaactagaagaattcaactgtctcaagaatcaaggtaccccaatatatctcgcaattccaaactttgtttgagggactcgttatccagctcttggtagccacacctgcaatgta

SEQ ID NO: 557 - DNA, 430 bp, Homo sapiens
  misc_feature (43)..(44): n is a, c, g, or t
  misc_feature (46)..(46): n is a, c, g, or t
  misc_feature (120)..(120): n is a, c, g, or t
  misc_feature (358)..(358): n is a, c, g, or t
gggtccatctgtagcaaatgggttgagtgtgtcagtatgtggnntnggttactgtgtattcgccaggaatcaccccgataggctgccaccctattaggtgatacctgtttaatatgttgnccaggtagactagtagttgcatcagtttgctgtaacaagtaaccagtgaggtaacacagtggtgaagcaggtcaggggaggtcaggaggatgtctgagagaaagaagtccgggagatgaatggctgtctaggaaggaggatgtcagtgcacggttagtgtttgagcagagggcagacttgtaaagtacctgtagtgaaaagaatgtggggacccgattagcagaaaggtgtttgcacntactttatacaaaatacagaatactttatattggaagtgaaagaaatgaacgtggacttttacacatgtgca

SEQ ID NO: 558 - DNA, 437 bp, Homo sapiens
  misc_feature (137)..(137): n is a, c, g, or t
taaattgtccctcgtattatttctccacgtctgttttagtttaatgtctcctaagcttttctctcatagcgtagacctagggaagggatgggaagattgcccagtccccgatggctgcgcacacaggaggcggcggngcacaaggcaagtgagtttgcactgtcagccccagaccgtaagcttggctacactgatgtttttctttactaaggatactattcaaaaattaacattttcatctcagtaagtttttagaacatcaaaatgttttctgagctccaagtggctaggttgtaaaagttttataataatttgcaattaaaatacatgatacatattaatccattaaagactagtgggaatgtatcagccagagtagcaagtaatttttgttttataaatcatagtatctgtcatcttgcagtattaccaatgct

SEQ ID NO: 559 - DNA, 519 bp, Homo sapiens
  misc_feature (49)..(49): n is a, c, g, or t
  misc_feature (61)..(61): n is a, c, g, or t
gtaatgaagagctaactgtgttataatcatcttgcttttgcctgaattnggagaaagtatnataattaagttcccagtatcagaaatgtccttacataagattaaaatatcttgatgactaataccattctatgagaaagagtagttatatgcccagactgtattaatttactttagaaactaatgtttgaagtaatggaaaaaattttaaattataaagctaaggtgcaataacatttgctacttatttatagaattatttgaagaattttgtttttgaagtaatgctttaaggagtataagatattcaagataaattatactataaaatgattttattgaaagttgaaggttacacaaattgttttaggtatgagcagaagaggttaaggtatttctaaaggtaacatatagtcaagagtttcctcaaaatagttatttggagaagaatcagaatgtctgtgtatttcttgtctgtttctatgttgtcttatagctctgactaaatgtgtttaccta

SEQ ID NO: 560 - DNA, 412 bp, Homo sapiens
acagccacagtttatcctgaaccgcaaaacaaagaagcatttgtccgctcccagatgtatagtactgattatgaccagattctacctgattgttattcttggcctgaagaggtgcagaaaatacagaccaaagttgaccagtaggataatagcaaacatttctaactctattaatgaggtctttaaacctttcataatttttaaaggttggaatcttttataatgattcataagacacttagattaagattttactttaacagtctaaaaattgatagaagaatatcgatataaattgggataaacatcacatgagacaattttgcttcactttgccttctggttatttatggtttctgtctgaattattctgcctacgttctctttaaaagctgttgtacgtactacggag

SEQ ID NO: 561 - DNA, 433 bp, Homo sapiens
ggagctgctatgaagtacctttcttatgttgctaggctactgtttctgaaagccctggatctctttgcaccaaaaatggtccagatagactctttttaaggatcttggctgctttttactagaaggttgcttttatgagcatatttatactgctgaaggatgagtgttaattttaattaactttgccgttttgtagagaaaactattcacaagataaattccaagtcttttcacctgtcaggcatgcatattttaatatctgtttggatagtcagaagtagaatcataaaggtaaaatatgagttgttactttgtttcttcgatgtcatattttatgtgtaatatatatgtaaagggccattcttaagttctctccttaaacttaatgctgtcaagtgttagatgtgtgcatgtgaacttgttgcactgcaga

SEQ ID NO: 562 - DNA, 490 bp, Homo sapiens
aatactctgagtttcatagtgattgaggcataactatcaatcacaaaagtatattcaaaaattatattttgaacaactcgaatcactcatttgtttccatattaaaatcacaaactcatccattaatgtagataaagcactgtttggatatgagatgtagcaaattccaatacattattggacttccatttggaatcatatgggatactgctggtcttatcctgtccctcctccaggtagagagaccacatgcaggctcaacataacataagctagaaaaattagatgactgaatttctatggcatattgataataaaattcattccatttgctgattgtctgaaattttctagaatactaataaaatacatactatagattctttattagtgaagtatgcactaatcaatactttgaacacaaagcctgtgttactgatttggccgttttgtgaagaaacatttatctttgtacgttcttctattgtgc

SEQ ID NO: 563 - DNA, 475 bp, Homo sapiens
cagaccggcagtcatcatggcagtttcagcgttcaaacagcaatagctcaagtgtgataactactgaggataataaaatccacattcacttaggaagtccttacatgcaagctgtagccagcccttcagcaccactgcaggataaccgaactcaaggcttaattaacggggcactaaacaaaacaaccaataaagtcaccagcagtattactatcacaccaacagccacacctcttcctcgacaatcacaaattacagtaagtaatatatataactgaccacgctcaccctcatccagtccatactgatatttttgcaaggaactcaatccttttttaatcatccctccatatcccccaagactgactgaactcgtactttgggaaggtttgtgcatgaactatacaagagtatctgaaactaactgttgcctgcatagtcatatcgagtgtgcacttactgtatatcttttcat

SEQ ID NO: 564 - DNA, 306 bp, Homo sapiens
gaggcccagataatgagctgagattcagcatcccctggaggagtcggggtctcagcagaaccccactgtccctccccttggtgctagaggcttgtgtgcacgtgagcgtgcgagtgcacgtccgttatttcagtgacttggtcccgtgggtctagccttcccccctgtggacaaacccccattgtggctcctgccaccctggcagatgactcactgtgggggggtggctgtgggcagtgagcggatgtgactggcgtctgacccgccccttgacccaagcctgtgatgacatggtgctgattctgg

SEQ ID NO: 565 - DNA, 490 bp, Homo sapiens
tctggttgcctatagtgctctgggatcccaccgagaagaaccatgggtggacccgaactccccggtgctcttggaggacccagtcctttgtgccttggcaaaaaagcacaagcgaaccccagccctgattgccctgcgctaccagctacagcgtggggttgtggtcctggccaagagctacaatgagcagcgcatcagacagaacgtgcaggtgtttgaattccagttgacttcagaggagatgaaagccatagatggcctaaacagaaatgtgcgatatttgacccttgatatttttgctggcccccctaattatccattttctgatgaatattaacatggagggcattgcatgaggtctgccagaaggccctgcgtgtggatggtgacacagaggatggctctatgctggtgactggacacatcgcctctggttaaatctctcctgcttggtgatttcagcaagctacagcaaagcccattggccaga

SEQ ID NO: 566 - DNA, 491 bp, Homo sapiens
aagcaaatagtgccctcagctactgcagaagaaaagtcccactgaggaaaagaaagtcttgtgatttttaaaggcaagttttcaagtgctctcatagttctatcctctaattccattaaatccatactaggagcgtcagtgagggttttcatagcttttggaaatactttggtctctgaactgtaattagcaagaagtaaaaacagaaacgtcaaacgtcaaatgtttgctttgttacctggaggactaaatgtagatgtctttagtatactttgtatgttcttaaatattggaagataattttgtgaatctgtagattttattttttcagtcttaccttacaaatttcttttctatgaataatagaggaactcacggcactctgccacttgttaatgaaaggaagtgcagaggatttagaaaagtacatgatccccagaccacaacaaaccaaaacataaactcatgtctgtgtcccatggtcatagtca

SEQ ID NO: 567 - DNA, 501 bp, Homo sapiens
agaagatggccgggaactcgatcctgctggctgctgtctctattctctcggcctgtcagcaaagttattttgctttgcaagttggaaaggcaagattaaaatacaaagttacgcccccagcagtcactgggtcaccagagtttgagagagtatttcgggcacaacaaaactgtgtggagttttatcctatattcataattacattgtggatggctgggtggtatttcaaccaagtttttgctacttgtctgggtctggtgtacatatatggccgtcacctatacttctggggatattcagaagctgctaaaaaacggatcaccggtttccgactgagtctggggattttggccttgttgaccctcctaggtgccctgggaattgcaaacagctttctggatgaatatctggacctcaatattgccaagaaactgaggcggcaattctaactttttctcttccctttaatgcttgcagaagctgttcccaccatgaaggtaa

SEQ ID NO: 568 - DNA, 474 bp, Homo sapiens
agatcacagagcagcaagttcatacaacatgcatgttctcctctatcttagaggggtattcttcttgaaaataaaaaatattgaaatgctgtatttttacagctactttaacctatgataattatttacaaaattttaacactaaccaaacaatgcagatcttagggatgattaaaggcagcatttgatgatagcagacattgttacaaggacatggtgagtctatttttaatgcaccaatcttgtttatagcaaaaatgttttccaatattttaataaagtagttattttataggggatacttgaaaccagtatttaagctttaaatgacagtaatattggcatagaaaaaagtagcaaatgtttactgtatcaatttctaatgtttactatatagaatttcctgtaatatatttatatactttttcatgaaaatggagttatcagttatctgtttgttactgcatcatctgt

SEQ ID NO: 569 - DNA, 444 bp, Homo sapiens
gaaactgctgagacctatttccctttcttggggagagaataagtgacagctgattaaaggcagagacacaggactgctttcaggctcctggtttattctctgattgactgagctccttccaccagaaggcactgcctgcaggaagaagatgatctgatggccgtgggtgtctgggaagctcttcgtggcctcaatgccctcctttatcctcatctttcttctatgcagaacaaaaagctgcatctaataatgttcaatacttaatattctctatttattacttactgcttactcgtaatgatctagtggggaaacatgattcattcacttaaaatactgattaagccatgggcaggtactgactgaagatgcaatccaaccaaagccattacattttttgagttagatgggactctctggatagttgaacctcttcactttata

SEQ ID NO: 570 - DNA, 464 bp, Homo sapiens
gtgatggttggcttgagtacctttttaaatctagcccagtataaacattagcctgcttaatatttagacatttataggtagaattctgagcactcaactcatgtttggcattttaaagtaaaaacaagtgtgacttcgaggaccaaagaaattgtcagctatacatttatctttatgaactcatttatattcctttttaatgactcgttgttctaacatttcctagaagtgttcttataaaggtctaatgtatccacaggctgttgtcttattagtaaatgcaaagtaatgactttgtctgttttactctagtctttagtacttcaaaattaccttttcatatccatgatcttgagtccatttgggggatttttaagaatttgatgtatttcaatacactgttcaaaattaaattgtttaattttatgtatgagtatgtatgttcctgaagttggtcctattta

SEQ ID NO: 571 - DNA, 499 bp, Homo sapiens
aaatatcagttactcagccctgggccccaccacctaggccactcctccaaaggaagtctaggagctgggaggaaaagaaaagaggggaaaatgagtttttatggggctgaacggggagaaaaggtcatcatcgattctactttagaatgagagtgtgaaatagacatttgtaaatgtaaaacttttaaggtatatcattataactgaaggagaaggtgccccaaaatgcaagattttccacaagattcccagagacaggaaaatcctctggctggctaactggaagcatgtaggagaatccaagcgaggtcaacagagaaggcaggaatgtgtggcagatttagtgaaagctagagatatggcagcgaaaggatgtaaacagtgcctgctgaatgatttccaaagagaaaaaaagtttgccagaagtttgtcaagtcaaccaatgtagaaagctttgcttatggtaataaaaatggctcatacttatatagcacttact

SEQ ID NO: 572 - DNA, 468 bp, Homo sapiens
ggtgcaacaggaccaatgggccagcaaggcatccctggcatccctgggcccccgggtcccatgggccagccaggcaaggctggccactgtaatccctctgactgctttggggccatgccgatggagcagcagtacccacccatgaaaaccatgaaggggccttttggctgaaattccccacctgcctttggatgaaagactccgttgggaataaatggccaaagcttataggactctgtgacaggttgtgaatgttttttttttttgttgttgttgtttttaattgctgttaatattttttaaataataaagaaacaaaactatctgccctttcccttccagtgggttcctctggtgctgcagccagagctccctgttgccctccttttcccgtttagtcccaggaacaaaaagggcatttgggtacaggggcatatacctgtaatcctagctattcaaggggctgag

SEQ ID NO: 573 - DNA, 406 bp, Homo sapiens
gggtctgaatctagcaccatgacggaactagagacagccatgggcatgatcatagacgtcttttcccgatattcgggcagcgagggcagcacgcagaccctgaccaagggggagctcaaggtgctgatggagaaggagctaccaggcttcctgcagagtggaaaagacaaggatgccgtggataaattgctcaaggacctggacgccaatggagatgcccaggtggacttcagtgagttcatcgtgttcgtggctgcaatcacgtctgcctgtcacaagtactttgagaaggcaggactcaaatgatgccctggagatgtcacagattcctgcagagccatggtcccaggcttcccaaaagtgtttgttggcaattattcccctaggctgagcctgctcatgtacc

SEQ ID NO: 574 - DNA, 535 bp, Homo sapiens
ccttctctgatttcttcagcagggtcaaaagacagttactagcaatggggaatgcttgtcactgtggagaaagagttttgtatatgtctgataccgttgttataacaaaacaaatttttttactatagttttttgttttctacctgcacacccaccagaagagcacaaagcaaggccattgcaacaggcatttaaaaattattatcaaacatgcacatgcttgtacacacacacacacacacacacaaacaggggcatttgtaaaggtgtccctggaatgtaagatttataatgtttaaggcaaggtgaaggcattgccaagtgtgtgtcgctcataggactagtgtatattcactgaaagttaacctgatgatttgttattgtttgaaccatatgctgatttgcttctggtttctgtttagtgtgttctctctgataaggggctgaaagattctgcatcacacatcctctgagacctaccatgtcgcacactttgttaatgacaaacttcactctacactatacagtaccttgt

SEQ ID NO: 575 - DNA, 401 bp, Homo sapiens
ggcctcccaaagatgctagtattatgggcgtgaaccaccatgcccagccgaaaagcttttgaggggctgacttcaatccatgtaggaaagtaaaatggaaggaaattgggtgcatttctaggacttttctaacatatgtctataatatagtgtttaggttcttttttttttcaggaatacatttggaaattcaaaacaattgggcaaactttgtattaatgtgttaagtgcaggagacattggtattctgggcagcttcctaatatgctttacaatctgcactttaactgacttaagtggcattaaacatttgagagctaactatatttttataagactactatacaaactacagagtttatgatttaaggtacttaaagcttctatggttgacattgtat

SEQ ID NO: 576 - DNA, 396 bp, Homo sapiens
attcttctaattgctgtgtgtcccaggcagggagacggtttccagggaggggccggccctgtgtgcaggttccgatgttattagatgttacaagtttatatatatctatatatataatttattgagtttttacaagatgtatttgttgtagacttaacacttcttacgcaatgcttctagagttttatagcctggactgctacctttcaaagcttggagggaagccgtgaattcagttggttcgttctgtactgttactgggccctgagtctgggcagctgtcccttgcttgcctgcagggccatggctcagggtggtctcttcttggggcccagtgcatggtggccagaggtgtcacccaaaccggcaggtgcgattttgttaacccagcgacga

SEQ ID NO: 577 - DNA, 318 bp, Homo sapiens
ttccacatcagtaactgccctggggtttgtgctgtacaaatacaagctcctgccacggtcttgaagttctgttcttatgctctctgctcactggttttcaataccaccaagaggaaaatattgacaagtttaaaggctgtgtcattgggccatgtttaagtgtactggatttaactacctttggcttaattccaatcattgttaaagtaaaaacaattcaaagaatcacctaattaatttcagtaagatcaagctccatcttatttgtcagtgtagatcaactcatgttaattgatagaataaagccttgtgatcact

SEQ ID NO: 578 - DNA, 411 bp, Homo sapiens
ctttgcgggcacagagactgccacaaagtggagcggctacatggaaggggcagttgaggctggagaacgagcagctagggaggtcttaaatggtctcgggaaggtgaccgagaaagacatctgggtacaagaacctgaatcaaaggacgttccagcggtagaaatcacccacaccttctgggaaaggaacctgccctctgtttctggcctgctgaagatcattggattttccacatcagtaactgccctggggtttgtgctgtacaaatacaagctcctgccacggtcttgaagttctgttcttatgctctctgctcactggttttcaataccaccaagaggaaaatattgacaagtttaaaggctgtgtcattgggccatgtttaagtgtactggatttaactacctttg

SEQ ID NO: 579 - DNA, 201 bp, Homo sapiens
tgggagcatggtgagcagccctggtgctcagcagccatacctatgggacacacactacgaaaaggatgcctttagggtttgggggagattttactcctttcttcaacaactattcactggacaagttctctgctcccatgacgcgccaggcacagttctgcaagtatattgtgaatgtattgttctagtgggatacacaaa

SEQ ID NO: 580 - DNA, 336 bp, Homo sapiens
gggatcctatttagctcttagtaccactaatcaaaagttcggcatgtagctcatgatctatgctgtttctatgtcgtggaagcaccggatgggggtagtgagcaaatctgccctgctcagcagtcaccatagcagctgactgaaaatcagcactgcctgagtagttttgatcagtttaacttgaatcactaactgactgaaaattgaatgggcaaataagtgcttttgtctccagagtatgcgggagacccttccacctcaagatggatatttcttccccaaggatttcaagatgaattgaaatttttaatcaagatagtgtgctttattctgttg

SEQ ID NO: 581 - DNA, 521 bp, Homo sapiens
atatcttcttcaggctctgacaggcctcctggaaacttccacatatttttcaactgcagtataaagtcagaaaataaagttaacataactttcactaacacacacatatgtagatttcacaaaatccacctataattggtcaaagtggttgagaatatattttttagtaattgcatgcaaaatttttctagcttccatcctttctccctcgtttcttctttttttgggggagctggtaactgatgaaatcttttcccaccttttctcttcaggaaatataagtggttttgtttggttaacgtgatacattctgtatgaatgaaacattggagggaaacatctactgaatttctgtaatttaaaatattttgctgctagttaactatgaacagatagaagaatcttacagatgctgctataaataagtagaaaatataaatttcatcactaaaatatgctattttaaaatctatttcctatattgtatttctaatcagatgtattactcttattatttctat

SEQ ID NO: 582 - DNA, 484 bp, Homo sapiens
gaagttgttcaactatccttgccactggaagaccaaacaaggttttcactgctttttcttttacataatatgctgagaattatttcttatgctttttactacaaacaaaattactcacctggattaaagattaaggccttaatctgtttagattatctttaatctccatgaaatcgtgaaataagacaagaatagtgtttcagctgtaggccattttacagctaattgcccataaattgtagcatttattgacctgaagtactaagctaattgtcttgactactcaaagcccctgaattgttgtcaactttcccctttgtgttgtgtagccctaacgtcatttagcttgttgtctgatgcctccagtaggacacctccgatggagctttgatttctgagcagcgaaagctcccttcctaagatgcatctcgcataggctgcctatgatgaaggaccgtgcacctccactccaacagagtgctga

SEQ ID NO: 583 - DNA, 503 bp, Homo sapiens
tatcggctacatatgcagtctgtgaattatgtaacatactctatttcttgagggctgcaaattgctaagtgctcaaaatagagtaagttttaaattgaaaattacataagatttaatgcccttcaaatggtttcatttagccttgagaatggttttttgaaacttggccacactaaaatgtttttttttttttacgtagaatgtgggataaacttgatgaactccaagttcacagtgtcatttcttcagaactccccttcattgaatagtgatcatttattaaatgataaattgcactcgctgaaagagcacgtcatgaagcaccatggaatcaaagagaaagatataaattcgttcccacagccttcaagctgcagtgttttagattgcttcaaaaaatgaaaaagttttgcctttttcgatatagtgaccttctttgcatattaaaatgtttaccacaatgtcccatttctagttaagtcttcgcacttgaaagctaacat

SEQ ID NO: 584 - DNA, 465 bp, Homo sapiens
cagaagggctggatgccccgggagagcgtgctcccacacctgcaggtgcagcacctgaccggggggctcatcgaccccaagaggacaggccgcatccccatccagcaggccctcctctccgggatgatcagtgaagagctggcccagctcctgcaggacgagtccagctacgagaaggatttgacagaccccatctccaaggaacggctgagctacaaggaggccatgggccgctgccgcaaagaccccctgagcggcctgctgctcctgccagcggcactggaggggtaccgctgctaccgctccgcctcccccaccgtcccgcgctcccttcgctgacacgggccaaggagccagtggggaagtgcgtgtgttgggccaggtaggatacgtacacctcttgcctcagagcagcctcatcccaggcagtgggtcttccctctgtccaaccactgttttattatt

SEQ ID NO: 585 - DNA, 360 bp, Homo sapiens
  misc_feature (271)..(271): n is a, c, g, or t
ttttgtattctatcccagatcacaggaaagttataaaaatcaaaccgtcaccctttagtttgcttgaactttagtaaaccacctgcttagggactttgaacttaaatatatccccttcctcaagtggtgctattttaaaactaaaaaaaactttgaattggctatttttttaatgcaatattttttttctgaattcattatgatccccatattgggtaatgctgaacatttatctgaaacagatgaggatattattattttgtatccaaanagaaattcagataaagggaaatttgactagtgtaatctgagatatgtcatagggatttctttctgacaaaagggtgctttgctgttctt

SEQ ID NO: 586 - DNA, 520 bp, Homo sapiens
gatgacgggggatctgaggctgtgtctctgccttgtctttagaggacttcagcgtccaagactggggcccacccttctcaccagcactaaatgcactaacaaggactccagacctgcagccccagacccgccgtagtataagcctaacaagcaacacgtagcaccttagtctttgttccaggagagctgagcaagctggtgaaaccactctccttcctttaaacaccgtttcaaccaacctctccctggagccaacctgtaaaaagtgggttgattgctgacagcatggtcttccctccctgcatttcagacataccagttactgaaagcaaatcagttttaagtgatttctcagtgctgaaaagcctgtccaggtttccttccctttcccaagcctctctctgtaatactccctttgggcgaagctaacatcggtgcctccccgaccttgctgactaggcacatgggacgcaaaggagggagggaagcaaggccttgcctggcgagttgtcatgtggtt

SEQ ID NO: 587 - DNA, 468 bp, Homo sapiens
taaaccagtccactgttatacccggggcactctaaccatcacaatcaatcaatcaaattcccttaaatttgtatggcactggaactttggcaaagcacttttgacaagttgtgtctgattggagcttcatgatagccttgtgacatctttagggcaggattcttatccccattttgcagatgaaaaccctgagtcacagatttctgtgggactgtggatctcactggaagctatccaagagcccactgtcaccttctagaccacatgatagggctagacagctcagttcaccatgattctcttctgtcacctctgctggcacaccagtggcaaggcccagaatggcgacctctctttagctcaatttctgggcctgaggtgctcagactgcccccaagatcaaatctctcctggctgtagtaacccagtggaatgaatttggacatgccccaatgcttctatatgcta

SEQ ID NO: 588 - DNA, 523 bp, Homo sapiens
tttggtggttttattctatcggtataaaggcatcgatattttagatgcacccgtgtttgtaaaaatgtagagcacaatggaattatgctggaagtctcaaataatatttttttcctattttatactcatggaagagataagctaaagaggggacaataatgagaaatgttggtgtgcttttctaagcatttaaaacataattgccaattgaaaccctaaatatgtttacataccattaagatatgattcatgtaacaatgttaaattaattataatgggattgggtttgttatctgtggtagtatatatcctagtgttcctatagtgaaataagtagggttcagccaaagctttctttgttttgtaccttaaattgttcgattacgtcatcaaaagagatgaaaggtatgtagaacaggttcacgtgattacctttttcttttggcttggattaatattcatagtagaactttataaaacgtgtttgtattgtaggtggtgtttgtattatgcttatgactat

SEQ ID NO: 589 - DNA, 465 bp, Homo sapiens
ctcacacttgtctgttcttcagtgctggaggtcctggcagggtcaggctggggtaagccggggttccacagggcccagccctggcaggggtctggccccccaggtaggcggagagcagtccctccctcaggaactggaggaggggactccaggaatggggaaatgtgacaccaccatcctgaagccagcttgcacctccagtttgcacagggatttgtcctgggggctgagggccctgtccccacccccgcccttggtgctgtcataaaagggcaggcaggggcaggctgaggagttgcccgttgccccccagagactgactctcagagccagagatgggatgtgtgagtgtgtgtgtgtgtgtgtgcgcgcgcgcgcgcgtgtgtgtgtgcacgcactggcctgcacagagagcatgggtgagcgtgtaaaagcttggccctgtgccctacagtggggacagct

SEQ ID NO: 590 - DNA, 532 bp, Homo sapiens
gaggaacttgccaaactaaggactagggtgcagaaggaaaattagcaccaataaagaggaaatatgaaaggattcttgaagatttccagttttgcaactgcataatagctatgcccaaggagtcaactattgtatatattgcagatttgcctttttaaaaaaatcactaattctacaatgtgccagatacatgtttcctatgcccaggaagttatgaagacttcaacaattaaactgaaaccaggggaagcttgcttagttttgggtttcattataaactcttagcctcagtccaggttaatctgaagtttgaaagctcagattaagcaagccatgccaagaaactggacgatgtgtaagcctagactctaaaattcaagatgtgtgaaataatataagtcaaaagcaagaaaaacgtaatcccgtctgaactcaagtagtcattcatataaatttgaacacacctgctgtgcctagacaagtgtctttctgtaagagctgtaactctgagatgtgctaaataaaccctctt

SEQ ID NO: 591 - DNA, 129 bp, Homo sapiens
aatcttcctgttgaatgcttcatgacttgaattctactttgataaaaacattgccatactgctttttatcttgatgaattcatctggcattgctttgccttatcatctcatctggagtttttaaatgcc

SEQ ID NO: 592 - DNA, 476 bp, Homo sapiens
cacttggcagaaggaccgtgcccggcggcctcattttgaccagctggtggctgcatttgacaagatgatccgcaagccagataccctgcaggctggcggggacccaggggaaaggccttcccaggcccttctgacccctgtggccctggactttccttgtctggactcaccccaggcctggctttcagccattggactggagtgctaccaggacaacttctccaagtttggcctctgtaccttcagtgatgtggctcagctcagcctagaagacctgcctgccctgggcatcaccctggctggccaccagaagaagctgctgcaccacatccagctccttcagcaacacctgaggcagcagggctcagtggaggtctgagaatgacgatacccgtgactcagccctggacactggtccgagaagggacatgtgggacgtgagccgggctccaacagcctctgtgagagatgcccca

SEQ ID NO: 593 - DNA, 537 bp, Homo sapiens
gcaggccatactggttccattgttctgtataatactgaataaataaatttacttttacatgatcgtataagtttctagataagataaacaaattctgtttaaatttttttaataaaaatcttaaaacactttttttctaacctagactgagaaattcatgtttacttttctaggtgtatgatactttgtaaagttgatactttcctaagaatttaacatgtcatatttttgaaatagatttaagtgtgcttcttattgctaaaaatactaaatgtcatgggtcatagtatctgatatcaatatcgttgataacatatccacaggtaacaccatgatgtaggcataaatggaaaacaaaaaccctactatttcaaatatattgtacttttttatttctgtaagccaactgtgtgccattttcactggacttttaaatctagactttagtgatgtctacattgtaaatgatcttttgtggatatttgtcacttggtttcagaaagttcacaaatgtagcaacagctcacatgactgagt

SEQ ID NO: 594 - DNA, 543 bp, Homo sapiens
tggccgagacagagtgccgctatgccacgcagctgcagcagatccaggggctcattggtggcctggaggcccagctgagtgagctccgatgcgagatggaggctcagaaccaggagtacaagatgctgcttgacataaagacacggctggagcaggagatcgctacttaccgcagcctgctcgagggccaggatgccaagatggctggcattggcatcagggaagcctcttcaggaggtggtggtagcagcagcaatttccacatcaatgtagaagagtcagtggatggacaggtggtttcttcccacaagagagaaatctaagtgtctattgcaggagaaacgtcccttgccactccccactctcatcaggccaagtggaggactggccagagggcctgcacatgcaaactccagtccctgccttcagagagctgaaaagggtccctcggtcttttatttcagggctttgcatgcgctctattccccctctgcctctccccaccttctttggagcaaggagatgcagctgtattgtgtaaca

SEQ ID NO: 595 - DNA, 568 bp, Homo sapiens
gcatgttagtttggtgctacacagtgttgatttttgtgatgtcctttggtcatgtttctgttagactgtagctgtgaaactgtcagaattgttaactgaaacaaatatttgcttgaaaaaaaaagttcatgaagtaccaatgcaagtgttttattttttttcttttttccagcccataagactaagggtttaaatctgcttgcactagctgtgccttcattagtttgctatagaaatccagtacttatagtaaataaaacagtgtattttgaagtttgactgcttgaaaaagattagcatacatctaatgtgaaaagaccacatttgattcaactgagaccttgtgtatgtgacatatagtggcctataaatttaatcataatgatgttattgtttaccactgaggtgttaatataacatagtatttttgaaaaagtttcttcatcttatattgtgtaattgtaaactaaagataccgtgttttctttgtattgtgttctaccttccctttcactgaaaatgatcacttcatttgatactgtttttcatgttcttgtattgcaaccta

SEQ ID NO: 596 - DNA, 360 bp, Homo sapiens
  misc_feature (250)..(250): n is a, c, g, or t
attttaagccctatcactgacacatcagcatgttttctgctttaaattaaaattttatgacagtatcgaggcttgtgatgacgaatcctgctctaaaatacacaaggagctttcttgtttcttattaggcctcagaaagaagtcagttaacgtcacccaaaagcacaaaatggattttagtcaaatatttattggatgatacagtgttttttaggaaaagcatctgccacaaaaatgttcacttcgaaantctgagttcctggaatggcacgttgctgccagtgccccagacagttcttttctaccctgcgggcccgcacgttttatgaggttgatatcggtgctatgtgtttggtttat

SEQ ID NO: 597 - DNA, 538 bp, Homo sapiens
  misc_feature (314)..(319): n is a, c, g, or t
gtcaattagagcgatcccaaggcatgggaccaggcctgcttgcctatgtgtgatggcaattggagatctggatttagcactggggtctcagcaccctgcaggtgtctgagactaagtgatctgccctccaggtggcgatcaccttctgctcctaggtacccccactggcaaggccaaggtctcctccacgttttttctgcaattaataatgtcatttaaaaaatgagcaaagccttatccgaatcggatatagcaactaaagtcaatacattttgcaggaggctaagtgtaagagtgtgtgtgtgtgtgtgtgnnnnnncgtgcatgtgtgtgtgtgtgtatgtgtgtgaataagtcgacataaagtctttaattttgagcaccttaccaaacataacaataatccattatccttttggcaacaccacaaagatcgcatctgttaaacaggtacaagttgacatgaggttagtttaattgtacaccatgatattggtggtatttatgctgttaagtccaaacctttatctgtctgtta

SEQ ID NO: 598 - DNA, 521 bp, Homo sapiens
atgggattttctagtttcctgccttcagagtatctaatcctttaatgatctggtggtctcctcgtcaatccatcagcaatgcttctctcatagtgtcatagacttgggaaacccaaccagtaggatatttctacaaggtgttcattttgtcacaagctgtagataacagcaagagatgggggtgtattggaattgcaatacattgttcaggtgaataataaaatcaaaaacttttgcaatcttaagcagagataaataaaagatagcaatatgagacacaggtggacgtagagttggcctttttacaggcaaagaggcgaattgtagaattgttagatggcaatagtcattaaaaacatagaaaaatgatgtctttaagtggagaattgtggaaggattgtaacatggaccatccaaatttatggccgtatcaaatggtagctgaaaaaactatatttgagcactggtctctcttggaattagatgtttatatcaaatgagcatctcaaatgttttctgca

SEQ ID NO: 599 - DNA, 532 bp, Homo sapiens
aacagcaagcctaagtcttctctgagaggagtttcgtgagctgaagaacaagctgctcatggcaagggctggccccagaaccctgcaagagaggccttctgtggatggagaactaggccttctcaaagctaaggacaaaatccagctaacccagtccctcggcccaggcctcctttcgtgctttgtgcttggtgggggggatttcgagggactttgcactggactctgggaacctttcatcattaaaaaaagggggaccattggggcctgagccaaggaactttccttctactgccttatagtgcttaaacattctccgcctccagggtgcagattcagagctggccagagtttcagtgatagccgtatgttaaacagaatctcacctcagtctcctggagggagatgtttaagaggggttaacacatcagatgggagggtcagcccggtgacctctaaggtatcttctaacctagaaactcaccataattatggtgcaaggtcagtgtgtctctgagatctatgtctgttg

SEQ ID NO: 600 - DNA, 447 bp, Homo sapiens
tggagcaggtagctgtgctggcgtctttgggaatcctttctttcctgggactggtggctggggccctggcactggggctctggctgaggctgagacggggtgggaaggatggatccccaaagcctgggttcttggcctcagtgattccagtggacaggcgtccaggagctccaaacctgtagaggacccaggagggcttcggcagattccacctataattctgtcttgctggtgtggatagaaaccaggcaggacagtagatccctatggttggatctcagctggaagttctgtttggagcccatttctgtgagaccctgtatttcaaatttgcagctgaaaggtgcttctacctctgatttcaccccagagttggagttctgctcaaggaacgtgtgtaatgtgtacatctgtgtccatgtgtgaccatgtgtctgtgaggcaggg

SEQ ID NO: 601 - DNA, 447 bp, Homo sapiens; identical to SEQ ID NO: 600

SEQ ID NO: 602 - DNA, 547 bp, Homo sapiens
cttcgttcgcagagcttttcagattgtggaatgttggataaggaattatagacctctagtagctgaaatgcaagaccccaagaggaagttcagatcttaatataaattcactttcatttttgatagctgtcccatctggtcatgtggttggcactagactggtggcaggggcttctagctgactcgcacagggattctcacaatagccgatatcagaatttgtgttgaaggaacttgtctcttcatctaatatgatagcgggaaaaggagaggaaactactgcctttagaaaatataagtaaagtgattaaagtgctcacgttaccttgacacatagtttttcagtctatgggtttagttactttagatggcaagcatgtaacttatattaatagtaatttgtaaagttgggtggataagctatccctgttgccggttcatggattacttctctataaaaaatatatatttaccaaaaaattttgtgacattccttctcccatctcttccttgacatgcattgtaaataggttcttcttgttctgag

SEQ ID NO: 603 - DNA, 543 bp, Homo sapiens
gcagagacctccctctgaaaaacacaaagaatggactctctcctgggatgaggacttgctttctttacctccggttctttccatgtcttagttggatgtccctgaaatggacacaggctgtgcattgtgccagaaacattgtgttatcttttatgttgttgttgttgctgttaaactataatatgtgacttctttttttattattttttgtttgaatgctttaaaaatctttaagtctgtggactgctgatgtacagtgcctttgctgctatggatcaaatcaaagaccgtgtagatatactttattgtataagtagaaaattacttaatttcatactagaaatggatggatgctgcaagttgaaatggactgtccattgacgttcctaatgtggtagcagaaaaaaatggtgtcttaagtgcttagtgtttgatgtcattaacagtttcgtaaaactctacagtgtagaaagattttgatactaaactgtgcgttgtacatagttctaatgcattgtattgaccaccagtacttctataatg

SEQ ID NO: 604 - DNA, 473 bp, Homo sapiens
gagcgcccatatgcatgcaacaaatgtggaaaggccttcacccagagctcacaccttattgggcaccagagaacccacaataggacaaagcgaaagaagaaacagcctacctcatagctctcaagccagttgaagaaaccttgccttttcagcttgaccctgcaatataacatgcacaggcctgcttgtgaatcaggactgaatgtgaaagggaagtattgagtgaggacattcccaaaaccaaaggacaactgaggagactgcccagcacataatgaataaataagaaaatgagtgaggagttattaacatcatttggaaaaaagatttcccattcacttgatattgtttgttcactcatttagtcattaaaagtgagattaataaaatctgaaaatgttatataataactttaaaaagccaggtaattaataatctgcactgatattacatccacagtaccacagtattta

SEQ ID NO: 605 - DNA, 465 bp, Homo sapiens
gaaaactggggtttgcatcactccactgcacagtgttagtgggacctgggggcaagtcccttgacttctctgagcctcagtttccttatgtgaaagttgctggaaccaaaatggagtcacttatgccaaactctaataaaatggagtcgggggggcacatagaagccctcacacacacatgcccgtaacaggatttatcaccaagacacgcctgcatgtaagaccagacacagggcgtatggaaaagcacgtcctcaaagactgtagtattccagatgagctgcagatgcttacctaccacggccgtctccaccagaaaaccatcgccaactcctgcgatcagcttgtgacttacaaaccttgtttaaaagctgcttacatggacttctgtcctttaaaacgttccccttggctgtggccctctgtgtatgcctgggatccttccaagcactcatagcccagata

SEQ ID NO: 606 - DNA, 373 bp, Homo sapiens
tgcgctggtttgcggctttgggaaataaaataccgttgtatatattctggcaggggtgttctagctttttgaggacagctcctgtatccttctcatccttgtctctccgcttgtcctcttgtgatgttaggacagagtgagagaagtcagctgtcacggggaaggtgagagagaggatgctaagcttcctactcactttctcctagccagcctggactttggagcgtggggtgggtgggacaatggctccccactctaagcactgcctcccctactccccgcatctttggggaatcggttccccatatgtcttccttactagactgtgagctcctcgagggcagggaccgtgccttatgtctgtgtgtgatca

SEQ ID NO: 607 - DNA, 364 bp, Homo sapiens
gccaaaatgatacctggaggcttatctgaggccaaacccgccactccagaaatccaggagattgttgataaggttaaaccacagcttgaagaaaaaacaaatgagacttatggaaaattggaagctgtgcagtataaaactcaagttgttgctggaacaaattactacattaaggtacgagcaggtgataataaatatatgcacttgaaagtattcaaaagtcttcccggacaaaatgaggacttggtacttactggataccaggttgacaaaaacaaggatgacgagctgacgggcttttagcagcatgtacccaaagtgttctgattccttcaactggctactgagtcatgatccttgctga

SEQ ID NO: 608 - DNA, 477 bp, Homo sapiens
tctgcagccttgctgttcattgccaccgtcgacaatgcctggtgggtaggagatgagttttttgcagatgtctggagaatatgtaccaacaacacgaattgcacagtcatcaatgacagctttcaagagtactccacgctgcaggcggtccaggccaccatgatcctctccaccattctctgctgcatcgccttcttcatcttcgtgctccagctcttccgcctgaagcagggagagaggtttgtcctaacctccatcatccagctaatgtcatgtctgtgtgtcatgattgcggcctccatttatacagacaggcgtgaagacattcacgacaaaaacgcgaaattctatcccgtgaccagagaaggcagctacggctactcctacatcctggcgtgggtggccttcgcctgcaccttcatcagcggcatgatgtacctgatactgaggaagcgcaaatagagttccggagctggg

SEQ ID NO: 609 - DNA, 480 bp, Homo sapiens
cgcgagggcatcatcaccatagagtcccaggatggaggacccttcccgcagctgggcagccgtgccgggctcttccagcacccgctgcaaagcgagtacagcagcatcaccaccacccacaccagcgccaccgagcccttcctagtggatgggccgaccctgggggcccagcacctggaggcaggcggctccctcacccggcatgtgacccaggagtttgtgagccggacactgaccaccagcggaacccttagcacccacatggaccaacagttcttccaaacttgaccgcaccctgccccacccccgccatgtcccactaggcgtcctcccgactcctctcccggagcctcctcagctactccatccttgcacccctgggggcccagcccacccgcatgcacagagcaggggctaggtgtctcctgggaggcatgaagggggcaaggtccgtcctctgtgggcccaaacctatttgta

SEQ ID NO: 610 - DNA, 523 bp, Homo sapiens
aacagagatgtcccccagggagcacatcaagggcaaagagaccaccccctctagcctagcagtgacccagaccatggccaccaaagctcccgagtgtgtggaggacccagatatggcaaaccagaggaagactgccctggagttctgtggagagacttggagctctctctgcacattcttcctcagcatagtgcaggacacgtcatgctaatgaggtcaaaagagaacgggttcctttaagagatgtcatgtcgtaagtccctctgtatactttaaagctctctacagtccccccaaaatatgaacttttgtgcttagtgagtgcaacgaaatatttaaacaagttttgtattttttgcttttgtgttttggaatttgccttatttttcttggatgcgatgttcagaggctgtttcctgcagcatgtatttccatggcccacacagctatgtgtttgagcagcgaagagtctttgagctgaatgagccagagtgataatttcagtgcaacgaactttctgctg

SEQ ID NO: 611 - DNA, 556 bp, Homo sapiens
gcagccaccagcgaatgctaggtctcggactaagcctacctgctctccaagtctcagtggcttcatctgtcaagtgggactctgtcacaccagccattcttatctctctgtgctgtggaagcaacaggaatcaagagactgccctccttgtccacccacctatgtgccaactgttgtaactaggctcagagatgtgcacccatgggctctgacagaaagcagatcctcaccctgctacacatacaggatttgaactcagatctgtctgataggaatgtgaaagcacggactcttactgctaacttttgtgtatcgtaaccagccagatcctcttggttatttgtttaccacttgtattattaatgccattatccctgaattccccttgccaccccaccctccctggagtgtggctgaggaggcctccatctcatgtatcatctggataggagcctgctggtcacagcctcctctgtctgcccttcaccccagtggccactcagcttcctacccacacctctgccagaagatcccctcaggactgcaacaggcttgt

SEQ ID NO: 612 - DNA, 193 bp, Homo sapiens
gtcccaagtgcaacaaggaggtgtacttcgccgagagggtgacctctctgggcaaggactggcatcggccctgcctgaagtgcgagaaatgtgggaagacgctgacctctgggggccacgctgagcacgaaggcaaaccctactgcaaccacccctgctacgcagccatgtttgggcctaaaggctttgggcg

SEQ ID NO: 613 - DNA, 402 bp, Homo sapiens
agacggtgcagtcggctgcatactcccagtcgggagtgtggtcagtctgcctgctgctgtgcggtagctccagaaccacctcgttcctggttttgtttggattttggcatcttgtttttctaacaacaaacaatggagaaaaagaattgattcttagtgacacagaagattgccttacgctcgtgagcgtgagaagccataagagagagaccgaattctgtggctcagcacacaggactgacccacagcccaggcagcgggtgtgtggagatggcgccctgtcctgccaaggggcgccaggagcagagccagggcctggcgagctggcgtggagcccacaggattcagcagcatggacagtcactcttgcactattccttctccaagccagaaaccacattt

SEQ ID NO: 614 - DNA, 536 bp, Homo sapiens
aatgctgaactccttgttagcccttcagattgttaggagtggttctcatttggtctgccagaatactgggttcttagttgacaacctagaatgtcagatttctggttgatttgtaacacagtcattctaggatgtggagctactgatgaaatctgctagaaagttagggggttcttattttgcattccagaatcttgactttctgattggtgattcaaagtgttgtgttccctggctgatgatccagaacagtggctcgtatcccaaatctgtcagcatctggctgtctagaatgtggatttgattcattttcctgttcagtgagatatcatagagacggagatcctaaggtccaacaagaatgcattccctgaatctgtgcctgcactgagagggcaaggaagtggggtgttcttcttgggacccccactaagaccctggtctgaggatgtagagagaacaggtgggctgtattcacgccattggttggaagctaccagagctctatccccatccaggtcttgactcatggcagc

SEQ ID NO: 615 - DNA, 548 bp, Homo sapiens
agccatcccatgttagagcttctcaagaggaagacagcccagactctttcagttctctggattctgagatgtgcaaagactaccgagtattgcccaggataggctatctttgtccaaaggatttaaagcctgtctgtggtgacgatggccaaacctacaacaatccttgcatgctctgtcatgaaaacctgatacgccaaacaaatacacacatccgcagtacagggaagtgtgaggagagcagcaccccaggaaccaccgcagccagcatgcccccgtctgacgaatgacaggaagattgttgaaagccatgagggaaaaaataaaccccagttctgaatcacctaccttcaccatctgtatatacaaagaattcttcggagcttgtcttatttgctatagaaaacaatacagagcttttgggaatggaatcactgattttcagtcttttccatttctttcctcctagaatctgtgatctgagggtataaagacatttccaccaagtttgagccctcaaaatgtcctgattacaatgctgtctgtcc

SEQ ID NO: 616 - DNA, 371 bp, Homo sapiens
tttctggccttcacccagacgaagaccttccacgaggccagcgaggactgcatctcgcgcgggggcaccctgagcacccctcagactggctcggagaacgacgccctgtatgagtacctgcgccagagcgtgggcaacgaggccgagatctggctgggcctcaacgacatggcggccgagggcacctgggtggacatgaccggcgcccgcatcgcctacaagaactgggagactgagatcaccgcgcaacccgatggcggcaagaccgagaactgcgcggtcctgtcaggcgcggccaacggcaagtggttcgacaagcgctgccgcgatcagctgccctacatctgccagttcgggatcgtgtagccggc

SEQ ID NO: 617 - DNA, 545 bp, Homo sapiens
tgccgtgggttttcaagtttactcatttctatggttgcaaataactctaaaacttattatataaactttcatattataggcagaacacaatggctaaatatctgttgcatgtactttaaagtttattataaaatataaacagatatataaagatgttgactcttacctgtgattttgcatggtcagactcggtgtcaggtacggagaggattctcatgactgtcttacctctactgaatattctagtgagttatatgatttacggagtgattaacagaggtctatataaagttacttttcccctttacttaattatattgtagtgtgcagataacaaaactgctaccttctcatccaagtggtctgtagaattcatgtcccttacagtggtcatttaaagtcaatatttatttatgtatgtaataaaaaaagttggatttttgtgtatgtctgtcacattatttagagagaagtaatcttgtaaaaatgttttgtaaaaaacaaaaaagtattgtaaatagtcttgatattctgtgactcattat

SEQ ID NO: 618 - DNA, 423 bp, Homo sapiens
agaggtctccctataccgagacccaccatccttccatcctgaggaccgccccaaccctcggagccccccactcagtaggtctgaaggcctccatttgtaccgaaacaccccgctcacgctgacagcctcctaggctccctgaggtacctttccacccagaccctccttccccaccccataagccctgagactcccgcctttgacctgacgatcttcccccttcccgccttcaggttcctcctaggcgctcagaggccgctctggggggttgcctcgagtccccccacccctccccacccaccaccgctcccgcggcaagccagcccgtgcaacggaagccaggccaactgccccgcgtcttcagctgtttcgcatccaccgccaccccactgagagctgctcctttgggggaatgtttggcaa

SEQ ID NO: 619 - DNA, 543 bp, Homo sapiens
taacatcagctgcctatgcctatgataaggtagcagtctgcattcttatggccattagatgttacaaactccttgcctctaaagtcagatcatgaagggataggtgttcatctaaggttacagttatgttaccgaaacacaaaactgccaaaatcttactctgctgttatgaatgtttaccatcagcattattttatcatttaatatgtgctcactgattgttaactgtagcttcagcgcgtgccaagcagttgacttaataggatcatcttgtgaatttgtttacgtgatgccaagcatcaagtcatgttttctttagtgtgtgtgcttacacaggtgttaaacagtttttctctattttaaactgagccttctttttaatatattcccgaagagatatgtaaataagctctcagagtttctgtgatgatttgttgagccttgctggacaagtggtttgtttgtgtgcaaaccaaactttctttacccagtgcaatagatttgtttgactgcttgtgtctttttatgacctgtttgcctttt

SEQ ID NO: 620 - DNA, 406 bp, Homo sapiens
gcagactgggagttgctagcaaacaaatggcttacttacaaaagcagcttttagttcagacttagtttttataaaatgagaattctgacttacttaaccaggtttgggatggagatggtctgcatcagctttttgtattaacaaagttactggctctttgtgtgtctccaggtaactttgcttgattaaacagcaaagccatattctaaattcactgttgaatgcctgtcccagtccaaattgtctgtctgctcttatttttgtaccatattgctcttaaaaatcttggtttggtacagttcataattcaccaaaaagttcatataatttaaagaaacactaaattagtttaaaatgaagcaatttatatctttatgcaaaaacatatgtctgtctttgcaaagga

SEQ ID NO: 621 - DNA, 530 bp, Homo sapiens
gactctttgaaatgacatgttcccttaaggtactgaagctttatttgcatatttatttcagatgtttcgagtaaacttgaaaagggtaggcacgaagcaatttgttgctgcttgtcacccccaagtccccgtggaggttctgtattttaagaaacagtgcgttgagtgtacagattttatttatgcgtaatttaatggggtctgtaaatactggtgcacttcttacgacttttttgagacatgggatccaattttaatattaacttttaatggtgatggggtaatctataacacatcataaggttttattcatatatatacagggtattaagaattaagaggatgctgggctctgttcttggcttggaagattctatttaattgaaactctctgttcagaaagcaataactttgtctcgttcctgttgggctgaaccctaaggtgagtgtgcagtacagtgtgtgtgggtgaaatggagatttggaattgaactctctgcctgtaaatgttccccaaataattgttgtgt

SEQ ID NO: 622 - DNA, 434 bp, Homo sapiens
aacggccatttgggatgccagggtggatgaaaaggtgaagaaatcaggggattgagacttgggtgggtgggcatctctcaggagccccatctccgggcgtgtcacctcctgggcagggttctgggaccctctgtgggtgacgcacaccctgggatggggctagtagagccttcaggcgccttcgggcgtggactctggcgcactctagtggacaggagaaggaacgccttccaggaacctgtggactaggggtgcagggacttccctttgcaaggggtaacagaccgctggaaaacactgtcactttcagagctcggtggctcacagcgtgtcctgccccggtttgcggacgagagaaatcgcggcccacaagcatcccccatcccttgcaggctgggggctgggcatgctgcatcttaaccttttgtatttat

SEQ ID NO: 623 - DNA, 417 bp, Homo sapiens
ggagtttgttgacctcatgaacagcaaagaatccaagtttaccttcaagatgaatccaggtgatgtgattacttttgataactggcgcttacttcatggccgacgtagctatgaagcaggaactgagatatcccgccatctagaaggagcttatgctgactgggatgtggtcatgtcaaggcttcgtatcttaaggcagagggtggagaatggaaactgaagtcacctgtagataattttaataagattccaatgaccatattttgtgagatatggcacattattcacagaccatgatctttgtgatttacatataatttccttaacaatgaacatgtaacttctctcacaagagtactctttactttgtaatcatatacaatgtcaactttttagatgtttcaccactcttttgca

SEQ ID NO: 624 - DNA, 317 bp, Homo sapiens
cgccatcaccgagcgcttgatgtgcgcggagagcaatcgccgggacagctgcaagggtgactccgggggcccgctggtgtgcgggggcgtgctcgagggcgtggtcacctcgggctcgcgcgtttgcggcaaccgcaagaagcccgggatctacacccgcgtggcgagctatgcggcctggatcgacagcgtcctggcctagggtgccggggcctgaaggtcagggtcacccaagcaacaaagtcccgagcaatgaagtcatccactcctgcatctggttggtctttattgagcacctactatatgcagaaggggag

SEQ ID NO: 625 - DNA, 383 bp, Homo sapiens
ttttgcgtgaccccctgagtggggaaaggcaggctgttgcatggtggcctgagcgagcagaattcctccagggacaatggcgtctcttggccacatcttggttttctgtgtgggtctcctcaccatggccaaggcagaaagtccaaaggaacacgacccgttcacttacgactaccagtccctgcagatcggaggcctcgtcatcgccgggatcctcttcatcctgggcatcctcatcgtgctgagcagaagatgccggtgcaagttcaaccagcagcagaggactggggaacccgatgaagaggagggaactttccgcagctccatccgccgtctgtccacccgcaggcggtagaaacacctggagcgatggaatccggcca

SEQ ID NO: 626 - DNA, 317 bp, Homo sapiens
gggccacgccaggaatattcagaaaataatgagaactacattgaagtgccattgatttttgatcctgtcacaagagaggatttgcacatggattttaaatgtgttgtccataataccctgagttttcagacactacgcaccacagtcaaggaagcctcctccacgttctcctggggcattgtgctggccccactttcactggccttcttggttttggggggaatatggatgcacagacggtgcaaacacagaactggaaaagcagatggtctgactgtgctatggcctcatcatcaagactttcaatcctatcccaa

SEQ ID NO: 627 - DNA, 397 bp, Homo sapiens
gggatagtccatatgcaagcagctccaaaggaggaatgtgccctggagatcatcaaagggggagctctgcgccaagaagaagtgtattatgacagctcactctggaccactcttctgatcagaaatccatgcaggaagatcctggaatttctctactcaacgagctataatatggacagattcataaacaagtaggaactccctgagggctgggcatgctgagggattttgggactgttctgtctcatgtttatctgagctcttatctatgaagacatcttcccagagtgtccccagagacatgcaagtcatgggtcacacctgacaaatggaaggagttcctctaacatttgcaaaatggaaatgtaataataatgaatgtcatgcaccgctgcag

SEQ ID NO: 628 - DNA, 561 bp, Homo sapiens
attgctgctacttatataattgccaaaaagtgaaataatgtgtagttcatgtaaataatacattatatttctattttattatgaagaaggtgaatagccatatttgtaaaatgacaatcatgtgtgttaacccagtgctttccattcgtgaaaacacatttgctttttgtgatatgcacaatgtagataagtgttctgtctgactttcttttttgatatagaagtataaagaattgtggtttatatatttaaaagtgtcaagctgagtattaaaatgtatgcatgttgtctaagaaattgaatacttgaatgtgtctcacagtttgaaataagctatttgatgtaatacttcttgtgtgtatgcacatgaaacttagattttacatgaagtattttttcagtattatatgtaccctctgaaatacatagggatatgcgtattataccaaaatgttgctgaaaaatgggcacttaaagctttcagaatatgtcagtgctgatgtagcatgcttgttgcaattgccttttttctgtataaatgtctttaatgcaatatactgg

SEQ ID NO: 629 - DNA, 514 bp, Homo sapiens
cagactgttcagtgtttgtcaagcttctggtctaatatgtactcgaaagactttccgcttacaatttgtagaaacacaaatatcgttttccatacagcagtgcctatatagtgactgattttaactttcaatgtccatctttcaaaggaagtaacaccaaggtacaatgttaaaggaatattcactttacctagcagggaaaaatacacaaaaactgcagatacttcatatagcccattttaacttgtataaactgtgtgacttgtggcgtcttataaataatgcactgtaaagattactgaatagttgtgtcatgttaatgtgcctaatttcatgtatcttgtaatcatgattgagcctcagaatcatttggagaaactatattttaaagaacaagacatacttcaatgtattatacagataaagtattacatgtgtttgattttaaaagggcggacattttattaaaatcaatattgtttttgctttttctgaggagtctctttcagtttca

SEQ ID NO: 630 - DNA, 527 bp, Homo sapiens
gattctctgtaccaagtgatgcagcaatgctgggaggcagacccagcagtgcgacccaccttcagagtactagtgggggaggtggagcagatagtgtctgcactgcttggggaccattatgtgcagctgccagcaacctacatgaacttgggccccagcacctcgcatgagatgaatgtgcgtccagaacagccgcagttctcacccatgccagggaatgtacgccggccccggccactctcagagcctcctcggcccacttgacttagttcttgggctggacctgcttagctgccttgagctaaccccaaggctgcctctgggccatgccaggccagagcagtggccctccaccttgttcctgccctttaactttcagaggcaataggtaaatgggcccattaggtccctcactccacagagtgagccagtgagggcagtcctgcaacatgtatttatggagtgcctgctgtggaccctgtcttctgggcacagtggactcagcagtgaccacaccaacactgacc

SEQ ID NO: 631 - DNA, 489 bp, Homo sapiens
gagggtgatgccatctaaccctgcccctgtccaccccgggtgggtgaaactcactgagcagccaagactgttgcccgaggactcactgtatggtgccctctccaaagggtcgggagggtagctctccaggccagagcttgtgtccttcaacagagaggccagcggcaactggtccgttactggccaagggctctgaagaatcaacggtgctggtacaggatacaggaataaattgtatcttcacctggttcctaccctcgtccctacctgtcctgatcctggtcctgaagacccctcggaacaccctctcctggtggcaggccacttccctcccagtgccagtctccatccaccccagagaggaacaggcgggtgggccatgtggttttctccttcctggccttggctggcctctggggcaggggtggtggagagatggaagggcatcaggtgtagggaccctgccaagtggcacctgatttactctag

SEQ ID NO: 632 - DNA, 546 bp, Homo sapiens
gccaacatcaccatcattgagcaccagaagtgtgagaacgcctaccccggcaacatcacagacaccatggtgtgtgccagcgtgcaggaagggggcaaggactcctgccagggtgactccgggggccctctggtctgtaaccagtctcttcaaggcattatctcctggggccaggatccgtgtgcgatcacccgaaagcctggtgtctacacgaaagtctgcaaatatgtggactggatccaggagacgatgaagaacaattagactggacccacccaccacagcccatcaccctccatttccacttggtgtttggttcctgttcactctgttaataagaaaccctaagccaagaccctctacgaacattctttgggcctcctggactacaggagatgctgtcacttaataatcaacctggggttcgaaatcagtgagacctggattcaaattctgccttgaaatattgtgactctgggaatgacaacacctggtttgttctctgttgtatccccagccccaaagacagctcctggccatatatca

SEQ ID NO: 633 - DNA, 493 bp, Homo sapiens
  misc_feature (87)..(87): n is a, c, g, or t
cactgctagcagggcttcaaccaggaagggatcaacccaggaagggatgatcaggagaggcttccctgaggacataatgtgtaaganaggtgagaagtgctcccaagcagacacaacagcagcacagaggtctggaggccacacaaaaagtgatgctcgccctgggctagcctcagcagacctaaggcatctctactccctccagaggagccgcccagattcctgcagtggagaggaggtcttccagcagcagcaggtctggagggctgagaatgaacctgactagaggttctggagatacccagaggtcccccaggtcatcacttggctcagtggaagccctctttccccaaatcctactccctcagcctcaggcagtggtgctcccatcttcctccccacaactgtgctcaggctggtgccagcctttcagaccctgctcccagggacttgggtggatgcgctgatagaacatcctcaagacagtttcctt

SEQ ID NO: 634 - DNA, 489 bp, Homo sapiens
agtatttcccatttatcgcagaccttttttaggaagcaagcttaatggctgataattttaaattctctctcttgcaggaaggactatgaaaagctagaattgagtgtttaaagttcaacatgttatttgtaatagatgtttgatagattttctgctactttgctgctatggttttctccaagagctacataatttagtttcatataaagtatcatcagtgtagaacctaattcaattcaaagctgtgtgtttggaagactatcttactatttcacaacagcctgacaacatttctatagccaaaaatagctaaatacctcaatcagtctcagaatgtcattttggtactttggtggccacataagccattattcactagtatgactagttgtgtctggcagtttatatttaactctctttatgtctgtggattttttccttcaaagtttaataaatttattttcttggattcctgataatgtgcttctg

SEQ ID NO: 635 - DNA, 155 bp, Homo sapiens
gcaacggaagagtcctgggcggaaggaggcttctgtatgcttgtgaaaaagaacaatctgtgccaacggaaggttcttcaacaactttgctgcaaaacatgtacatttcaaggctgagcagccatcttagatttctttgttcctgtagacttata

SEQ ID NO: 636 - DNA, 355 bp, Homo sapiens
tgggttaagcctgcagggatcccggtgctctgtctcctgtgaagatggacggtatttcaacggccaggactgccagccctgccaccgcttctgcgccacttgtgctggggcaggagctgatgggtgcattaactgcacagagggctacttcatggaggatgggagatgcgtgcagagctgtagtatcagctattactttgaccactcttcagagaatggatacaaatcctgcaaaaaatgtgatatcagttgtttgacgtgcaatggcccaggattcaagaactgtacaagctgccctagtgggtatctcttagacttaggaatgtgtcaaatgggagccatttgcaaggatgca

SEQ ID NO: 637 - DNA, 469 bp, Homo sapiens
agcctatccttaataaatcctccactctctggaaggagactgaggggctttgtaaaacattagtcagttgctcatttttatgggattgcttagctgggctgtaaagatgaaggcatcaaataaactcaaagtatttttaaatttttttgataatagagaaacttcgctaaccaactgttctttcttgagtgtatagccccatcttgtggtaacttgctgcttctgcacttcatatccatatttcctattgttcactttattctgtagagcagcctgccaagaattttatttctgctgttttttttgctgctaaagaaaggaactaagtcaggatgttaacagaaaagtccacataaccctagaattcttagtcaaggaataattcaagtcagcctagagaccatgttgactttcctcatgtgtttccttatgactcagtaagttggcaaggtcctgactttagtcttaa

SEQ ID NO: 638 - DNA, 455 bp, Homo sapiens
gcttctgtcactgaattatctcccaagtgctggcagactgaatgttgatgtcattcgagccaagcaacttcttcagacagatgtgagccaaggttcagacccctttgtgaaaatccagctggtgcatggactcaaacttgtgaaaaccaagaagacgtccttcttaaggggcacaattgatcctttctacaatgaatccttcagcttcaaagttccccaagaagaactggaaaatgccagcctagtgtttacagttttcggccacaacatgaagagcagcaatgacttcatcgggaggatcgtcattggccagtactcttcaggcccctctgagaccaaccactggaggcgcatgctcaacacgcaccgcacagccgtggagcagtggcatagcctgaggtcccgagctgagtgtgaccgcgtgtctcctgcctccctggaggtgacctgagggc

SEQ ID NO: 639 - DNA, 418 bp, Homo sapiens
ggaactctaaaccttgtgatgactactaacaaatgtaaaattatgagtgattaagaaaacattgctttgtggttatcactttaagttttgacacctagattatagtcttagtaatagcatccactggaaaaggtgaaaatgttttattcagcatttaacttacatttgtactttagagtatttttgtataaaatccatagatttattttacatttagagtatttacactatgataaagttgtaaataattttctaagacagtttttatatagtctacagttgtcctgatttcttattgaatttgttagactagttctcttgtcttgtgatctgtgtacaattttagtcactaagactttcctccaagaactaagccaacttgatgtgaaaagcacggctgtatataatggtgatgtca

SEQ ID NO: 640 - DNA, 505 bp, Homo sapiens
taagacttgtactatgtgtggccatgaactgacatatgaaaaaatgtgattttttagttcagtgacctgttttatagaattttatatttaaataaaggaaatttagattggtccttttcaaaattcaaaaaaaaaagcaacatcttcatagatgaatgaaacccttgtataagtaatacttcagtaataattatgtatgttatggcttaaaagcaagtttcagtgaaggtcacctggcctggttgtgtgcacaatgtcatgtctgtgattgccttcttacaacagagatgggagctgagtgctagagtaggtgcagaagtggtaggtcagctacaaatttgaggacaagataccaaggcaaaccctagattggggtagagggaaaagggttcaacaaaggctgaactggattcttaaccaagaaacaaataatagcaatggtggtgcaccactgtaccccaggttctagtcatgtgttttttaggacgatttctgtctccacgat

SEQ ID NO: 641 - DNA, 533 bp, Homo sapiens
atcctacaacccaccttgaaggtataactggatccagagagggaaggactgacaagaaggaattattcagaaaaacactgacagatgttttataaattgtacagaaaaatagttaaaaatgcaataggttgaagttttccagatatgtttctctctgaaattactgtgaatatttaacaaacacttacttgatctatgttatgaaataagtagcaaattgccagcaaaatgtcttgtaccttttctaaagtgtattttctgatgtgaacttccttccccttacttgctaggtttcaataatttaaaagagtcaaacactataaatgagtaagttgacgatgttttaagattgcacctggcagtgtgcctttttgcaacaaatatttacctggcagtgtgcctttttgcaacaaatatttactttgcacttggagctgcttttaattttagcaaaatgttttatgcaaggcacaataggaagtcagttctcctgcacttcctcctcatgtagtctggagtactttctaaagggc

SEQ ID NO: 642 - DNA, 493 bp, Homo sapiens
ttgaacaaaccctcactgagcacctctgatgttgagcacctgctgaatactgagcactgaatgggggagggggaggggagcacggggtgagtcaacctgggactcggtctcagggatatgcctaccaatagcgggtatcgtaaggcatgtacccaaacataacggatgtaaggcagaaagtgatcggagaaggaatgagaaagtgtgcgtgatgttaatgaaaagtcatatgcagctagagcagacccaggaaagctttctggaagagattgcatctgaggaaattcaggaaggatctttgtagattggggggagattctaaattgaaggggtgatagggtgaggggccagagggaagtctgctgtgttctcatgtaggatgtcagccctccctgcaacttctctttttggccaatgtcttttcactttcctgaccctttagaatcatccccagccagacgcaatcatggaagttgccttattgtcactggtt

SEQ ID NO: 643 - DNA, 555 bp, Homo sapiens
caccacctacctatgatgccgtggtacagatggagtaccttgacatggtggtgaatgaaacactcagattattcccagttgctattagacttgagaggacttgcaagaaagatgttgaaatcaatggggtattcattcccaaagggtcaatggtggtgattccaacttatgctcttcaccatgacccaaagtactggacagagcctgaggagttccgccctgaaaggttcagtaagaagaaggacagcatagatccttacatatacacaccctttggaactggacccagaaactgcattggcatgaggtttgctctcatgaacatgaaacttgctctaatcagagtccttcagaacttctccttcaaaccttgtaaagaaacacagatccccttgaaattagacacgcaaggacttcttcaaccagaaaaacccattgttctaaaggtggattcaagagatggaaccctaagtggagaatgagttattctaaggacttctactttggtcttcaagaaagctgtgccccagaacaccagagatttcaacttagtca

SEQ ID NO: 644 - DNA, 300 bp, Homo sapiens
ttctttagggctcttcctacagccttgagaagtagataggcatcagagtatggtactataggaatcagaaaaattcaaaacaaatgtggattaagtgtttaggctctatgtggctcacgcagccagaatccttaagtctgtgtgtttctgtgtctcaagactgggctcacattctggctttgtccataacaatgctctgggatttcagggagttccctcatttgtaaaatgagggggtcagagcaggtgatatccatgtttcttccctttctgatattgttgtctgtggcatattctttg

SEQ ID NO: 645 - DNA, 551 bp, Homo sapiens
  misc_feature (114)..(114): n is a, c, g, or t
  misc_feature (119)..(120): n is a, c, g, or t
  misc_feature (127)..(127): n is a, c, g, or t
  misc_feature (129)..(129): n is a, c, g, or t
  misc_feature (149)..(149): n is a, c, g, or t
  misc_feature (152)..(152): n is a, c, g, or t
  misc_feature (163)..(163): n is a, c, g, or t
  misc_feature (167)..(168): n is a, c, g, or t
  misc_feature (189)..(189): n is a, c, g, or t
  misc_feature (243)..(243): n is a, c, g, or t
ctgctactttggaagatggctctggaggaaactctcatatggctaaaaaggcaggctagtttcttacttctacaggggtagagccttaaaaaagaacgtgctacaaattggttntcttnnagggttncnggttctccctgcccccaatnccnatatactttantgcnnttttatttttgcctttacggnctctgtgtctttctgcaagaaggcctggcaaaggtatgcctgctgttggtcccntcgggataagataaaatataaataaaaccttcagaactgttttggagcaaaagatagcttgtacttggggaaaaaaattctaagttcttttatatgactaatattcttggttagcaagactggaaagaggtgtttttttaaaatgtacataccagaacaaagaacatacagctctctgaacatttattttttgaacagaggtggtttttatgtttggacctggtaatacagatacaaaaactttaatgaggtagcaatgaatattcaactgtttgactgctaagtgtatctgtccatattttagcaag

SEQ ID NO: 646 - DNA, 468 bp, Homo sapiens
tctgcagtgagtgcaaccgcaccttccccagccacacggctctcaaacgccacctgcgctcacatacaggcgaccacccctacgagtgtgagttctgtggcagctgcttccgggatgagagcacactcaagagccacaaacgcatccacacgggtgagaaaccctacgagtgcaatggctgtgacaagaagttcagcctcaagcatcagctggagacgcactatagggtgcacacaggtgagaagccctttgagtgtaagctctgccaccagcgctcccgggactactcggccatgatcaagcacctgagaacgcacaacggcgcctcgccctaccagtgcaccatctgcacagagtactgccccagcctctcctccatgcagaagcacatgaagggccacaagcccgaggagatcccgcccgactggaggatagagaagacgtacctctacctgtgctatgtgtgaa

SEQ ID NO: 647 - DNA, 416 bp, Homo sapiens
tcaagtcctctggtggcagttccagcgtgaggtttgtttctaccacttattccggagtaaccagataaagagatgccctctgtttcattagctctagttctcccccagcatcactaacaaatatgcttggcaagaccgaggtcgatttgtcccagccttaccggagaaaagagctatggttagttacactagctcatcctattcccccagctctttcttttctgctgtttcccaatgaagttttcagatcagtggcaatctcagttcccttgctatgaccctgctttgttctttcccgagaaacagttcagcagtgaccaccacccacatgacatttcaagcaccaccttaagccagccagagtaggaccagttagacctagggtgtggacagctccttgcatcttaacactgtgc

SEQ ID NO: 648 - DNA, 555 bp, Homo sapiens
tcaggtgacctgaatctttcccttaaccgtacagtttctcgatggaattgtgtgatcagaaggtggaattctagtgataggcgacctcagacccgcattcatgttctgtgtgcctcttctattgcacatacactgatttttagcattgtctattcctatttttcctttgcccattgtacttccatatatcttttcattaacttacttgctgccttttttttttcttggtacacatttaaataaagtaatccttaacctgtgctgtaaagttcacccttggcatgctgttccaagaacctgggtttgaatcccaatcgttgtgaaacatactcagtattgataaaacctttttaataagtgatgcagagcagccaaggatatgttgacccagatgtcaaccaggctatttttatacttaaaacatgtcagcagagcataggcagaataaaatggtttaaataccccacagcaaatagagtaactgacaaaccaccaaaaactgaaaccccagacccaccagaaagacaagtgtctagcaatgccttggtacctgat

SEQ ID NO: 649 - DNA, 343 bp, Homo sapiens
ctgcccagcctgagtggctcagatgggatcccgtatcgaaccgtctctgagtggctcgagtccatacgcatgaaacgctacatcctgcacttccactcggctgggctggacaccatggagtgtgtgctggagctgaccgctgaggacctgacgcagatgggaatcacactgcccgggcaccagaagcgcattctttgcagtattcagggattcaaggactgatccctcctctcaccccatgcccaatcagggtgcaaggagcaaggacggggccaaggtcgctcatggtcactccctgcgccccttcccacaacctgccagactaggctatcggtgctgcttc

SEQ ID NO: 650 - DNA, 438 bp, Homo sapiens
  misc_feature (195)..(195): n is a, c, g, or t
atcactattttgaagcacagctttacagatgagtatctatgatacatatgtataataaattttgattgggtattaaaagtattagaaggtggttataattgcagagtattccatgaatagtacactgacacaggggttttactttgaggaccagtgtagtcaagggaaaacatgagttaaaaagaaaagcaggcnatattgcagtcttgattctgccacttacaggatagataacgcctgaactttaatgacaagatgatccaaccataaaggtgctctgtgcttcacagtgaatcttttccccatgcaggagtgtgctcccctacaaacgttaagactgatcatttcaaaaatctattagctatatcaaaagccttacattttaatataggttgaaccaaaatttcaattccagtaacttctattgtaaccattatt

SEQ ID NO: 651 - DNA, 389 bp, Homo sapiens
tccccaagactttactagtgccgataaactttctcaaagagcaaccagtatcacttccctgtttataaaacctctaaccatctctttgttctttgaacatgctgaaaaccacctggtctgcatgtatgcccgaatttgtaattcttttctctcaaatgaaaatttaattttagggattcatttctatattttcacatatgtagtattattatttccttatatgtgtaaggtgaaatttatggtatttgagtgtgcaagaaaatatatttttaaagctttcatttttcccccagtgaatgatttagaattttttatgtaaatatacagaatgttttttcttacttttataaggaagcagctgtctaaaatgcagtggggtttgttttgca

SEQ ID NO: 652 - DNA, 385 bp, Homo sapiens
aaacagttgctcacctacagacagtgcaacataaattagcagaattaaaaacacatatatgtgtaacccgagcatttgtggacaactgtctccagctgcatgaagcgaaacgtttggactccgccactgcttgcatggcgaaatattgggcatctgagttacaaaatagtgtagcttacgactgtgtacagctccatggaggttggggatacatgtgggagtacccaattgcaaaagcttatgtggatgccagagttcagccaatctatggtggtacaaatgaaataatgaaggagctgattgcaagagagattgtctttgacaagtagacatctgcccacatcctggagtcctattacagctaatctcgttttaaatctgctca

SEQ ID NO: 653 - DNA, 464 bp, Homo sapiens
gtagactcggctgcggagtactaccgcctccacttggagggctaccacggcaccgcaggggactccatgagctaccacagcggcagtgtcttctctgcccgtgatcgggaccccaacagcttgctcatctcctgcgctgtctcctaccgaggggcctggtggtacaggaactgccactacgccaacctcaacgggctctacgggagcacagtggaccatcagggagtgagctggtaccactggaagggcttcgagttctcggtgcccttcacggaaatgaagctgagaccaagaaactttcgctccccagcggggggaggctgagctgctgcccacctctctcgcaccccagtatgactgccgagcactgaggggtcgccccgagagaagagccagggtccttcaccacccagccgctggaggaagccttctctgccagcgatctcgcagcactgtgtttacag

SEQ ID NO: 654 - DNA, 479 bp, Homo sapiens
gaccttcccgctgcggacagggaagaggcaacctggccagcggcggcccgctctgggggccggggtacgcgaccacccaaccgagcagaggctttgggtacagaccccccagctactcgacagcctacctgcctggcagctatggctcttcccactgcaaactggaagccccctcaccgtgctccctccctcagagtgaccctaggctccagggggaactgctgcccacctatacccactacctgccccctggctctcccactccatacaaccctccccttgctggtgcccccatgcccctaacccacctctaaccctcatggacgcagacctcacgggacgggcctcatcctccttttttaatccagcagcatcccctaccccaggctgtcaaccctttctcctgttggactacagttcagaggcagcctgcagtcctcccatgatagccagggagagccgcacaacatacaattata

SEQ ID NO: 655 - DNA, 469 bp, Homo sapiens
tcatcaggctccagttattctccatctcccagctcagctttttctgtctgtaagcctgattttcaggaaggctctttcctagtgatggagatgaccaccatcagctccaggcttctatcctgctaacccagtaacccagtgggaagagatttacttattccaataattccaagtggagagtgtcattgacccgtttggggtctcatctctacttctaggggaatgaaacactttgagtggccaggcctgtgtcatgtgctaattcctagagccagggaaataaggtctgaggattcaggatggggtgaaaggtggttgcttaaaggaaaatgaaatacaattagcagaataaggggaaacgagtggtctgctctgctcgggcaaaacaagagatgcccattactgtgagggacccttgaagtctggactcttaaatgggtttttgctgatttcctgggtgcatgctagg

SEQ ID NO: 656 - DNA, 445 bp, Homo sapiens
aaggaagggcatccttctgccttttttatttttttaagctgtaaaaagagagaaaacttatttgagtgattatttgttatttgtacagttcagttcctctttgcatggaatttgtaagtttatgtctaaagagctttagtcctagaggacctgagtctgctatattttcatgacttttccatgtatctacctcactattcaagtattaggggtaatatattgctgctggtaatttgtatctgaaggagattttccttcctacacccttggacttgaggattttgagtatctcggacctttcagctgtgaacatggactcttcccccactcctcttatttgctcacacggggtattttaggcagggatttgaggagcagcttcagttgttttcccgagcaaaggtctaaagtttacagtaaataaaatgtttgaccatgccttcat

SEQ ID NO: 657 - DNA, 535 bp, Homo sapiens
ccatcaccttctcaactgggaaacccctgaaatgctctcagagcacctctgacgcctgaagaagttataccttcctcttcccctttaccaaataaagcaaagtcaaaccatcatctggaaacagtggccacttttcactgacctctcttcgacatctagtcaacccacccaatatgccactgggtttcgctcccaattccaccccaccctccattacagagctcaccacgccctcctagatcaccgtccccaacacacccattgcctctcaaggcccttatctcagccccttcctgtggccatttccctcagtgcccagatgattccctgggtgagggagacactggggcaccctcagaggttggagcaggctccctgctgtccctggatcctggacagatggctcagtaaactgtgggactaggtgcagacttttgccttcttggagtcctgggtctcctctgagaggtctgggtggtgctcctcctacgcctctagaggtctctgtgttcctcattttccttcaaaagcgggc

SEQ ID NO: 658 - DNA, 522 bp, Homo sapiens
aaataggcactcacaatgacaaccagagccagtttcttgtctttttatacattttgtcatcccagagactcggtatttgcttactgtgtttcaagtagaggaaatcgtggtcttgaactattctgtaccacagcaaacaatctatgttgctttactatcaactgctgtaatcgtttataaaacttacctagctccttcccttcttctatcatagctttaaacattagaattcataggcaaatcagttaaaacattaggatcataggcaaatcagttaccttgcagaaagagctttgtatgacagacattgtcttattttatttctgtaaaatattagctgtatgaatatgatttaattaacaagaaaacatttcttcctgattgacaacagtgttagcaaggtgcaaagcgaaactggttgctcaagttgatagaaaacaaaattctgaatatcttcaaattaattcggtaaaaacacattattttttcatatgtgatgtattcatgcagaacaactatctt

SEQ ID NO: 659 - DNA, 567 bp, Homo sapiens
cgcttctgcaagaccacgaacacagtggagcctctgagggggaatctggtgaagaaggactgtgcggagtcgtgcacacccagctacaccctgcaaggccaggtcagcagcggcaccagctccacccagtgctgccaggaggacctgtgcaatgagaagctgcacaacgctgcacccacccgcaccgccctcgcccacagtgccctcagcctggggctggccctgagcctcctggccgtcatcttagcccccagcctgtgaccttccccccagggaaggcccctcatgcctttccttccctttctctggggattccacacctctcttccccagccggcaacgggggtgccaggagccccaggctgagggcttccccgaaagtctgggaccaggtccaggtgggcatggaatgctgatgacttggagcaggccccacagaccccacagaggatgaagccaccccacagaggatgcagcccccagctgcatggaaggtggaggacagaagccctgtggatccccggatttcacactccttctgttttgttgccgtttattttgtactca

SEQ ID NO: 660 - DNA, 392 bp, Homo sapiens
ggctggctcaagaagcacgcgtactgctccaacctcagcttccgcctctacgaccagtggcgagcctggatgcagaagtcgcacaagacccgcaaccaggacgaggggatcctgccctcgggcagacggggcacggcgagaggtcctgccagataagctgtaggggctcaggccaccctccctgccacgtggagacgcagaggccgaacccaaactggggccacctctgtaccctcacttcagggcacctgagccaccctcagcaggagctggggtggcccctgagctccaacggccataacagctctgactcccacgtgaggccacctttgggtgcaccccagtgggtgtgtgtgtgtgtgtgagggttggttgagttgcctagaacccct

SEQ ID NO: 661 - DNA, 196 bp, Homo sapiens
ttttcataactgagcccactcgcaagttggagccatcagtgggatacgccacattttggaagccccagcatcgtgtacttaccagtgtgttcacaaaatgaaatttgtgtgagagctgtacattaaaaaaaacatcattattattattatttgcagtcatggagaaccacctacccctgacttctgtttagtctcc

SEQ ID NO: 662 - DNA, 489 bp, Homo sapiens
aaagcccttcatctaatatttgttgctattgccaatttttcaatgaaatgacctaaaaacaacaaaaaaaaataacctatacggtagttgctttagggggtggggggatgctatctgttagtgcttaaaagggggtaaatgcttgccgctttagaggtggatggtgctcataaaaggccccagtcgggggtatttaaaaaggactgaacagaaatccttagctagtagaatggcagcacgctgtaaaattattactgtattgtgtactggctataagatgtagacacctttcagtaagccaatcatttgtaaccattctagcagtgtcatattaggttaataaggctgctgtgttttaaagggcatttttatttgggttttggtgaaattctttaatttgttgattatattcacataaaatcagcattcattgacacatagctctaatgacatatgtatgaaaaaccatacactggatgacctagtcga

SEQ ID NO: 663 - DNA, 386 bp, Homo sapiens
cgccctggcacggtgctgagaattcgcggcttggttcctcccaatgccagcaggttccatgtaaacctgctgtgcggggaggagcagggctccgatgccgccctgcatttcaacccccggctggacacgtcggaggtggtcttcaacagcaaggagcaaggctcctggggccgcgaggagcgcgggccgggcgttcctttccagcgcgggcagcccttcgaggtgctcatcatcgcgtcagacgacggcttcaaggccgtggttggggacgcccagtaccaccacttccgccaccgcctgccgctggcgcgcgtgcgcctggtggaggtgggcggggacgtgcagctggactccgtgaggatcttctgagcagaagcccaggcggc

SEQ ID NO: 664 - DNA, 523 bp, Homo sapiens
gagagggcatatgcatcctctgtcctgatctaggtgtctatagctgaggggtaagaggttgttgtagttgtcctggtgcctccatcagactctccctacttgtcccatatttgcaaggggaggggatttggggctggggctccattcaccaaagctgaggtggcttctcattaaccccttaggactctgaagggtatggacctacgtgaatgtgtgtcagggggagacttgctggtgggttagtggtcctcaggatgtgataaaaacatccagtgtaaaaaggaagttggaatgggagttggcgggcagtgaacgagtgtggggaaggattggtgctggggcaacaggaaggggcctggggccgtttggctgcactaactttggtagctcagtgtgcatctaaagtgggactggggagggagctaagcttgggctgggctgcttggggcttggcatagggtggaaagggctaccctggggcttctgacccccctgtagtatgtgtggagggtgccctcccgtc

SEQ ID NO: 665 - DNA, 446 bp, Homo sapiens
aagagggcccagcaaggtaatttatggttgagctgatgtcaattggttcttgtcttgagtcgactcaatttagcccaagtgctgaaacaagaaatgtcatttttttcatcaaagacaccagggcagatttttaagtaaagaaagacaattggacccttaagaatttatgcatttgtaaagttgctgttgatccaaatattttcaagccatgtaatccattggttttgtgggcagtttaataaacctgaacctttgtgtgttttctaattgtacctgagttgaccatcctttctttttatagtatatttcttgtatgatattttgtaaagctctcacctggttcttttatggggacttttcgtttttgggcaactccagtgtatttatgtgaaactttataagagaattaatttttccatttgcatattaatatgttcctccacaca

SEQ ID NO: 666 - DNA, 554 bp, Homo sapiens
gttttggttttgactcacctgaaagtttttttggtttaaaagaagaataggcggggcacggtggctcatgcctgtaatcccagcactttgggaggctgaggcaggtggatcacgaggtcaggagatcgacaccatcctggctaacacggtgaaaccccgtctctactaaaaaatacaaaaaattagctgggtgtggtggtgggggtgggcgcctgtgatcccagctacgtgggaggctgaggcagcagactggtgtgaacccgggaggtggagcttgcagtgagccgagatcgcgccactgcactccagcctgggcgacagagcgagactccatctcaaaaaaaaaaaaaaaaaaaagaaagaaagaaaaataattttgggagtttctggaaaggtactaggatttctcaaaaggatttgtcttctcccttgtgaaagacagatgtcagactaatcaggcttatccgatgtgctacatgagatggaaatgcgtgtgaaatagtaagtcacactaagtcttctggaggttctatttacgggtttggtttgatatg

SEQ ID NO: 667 - DNA, 504 bp, Homo sapiens
gaaagagctagattctctctctcaaaaaaaaaaaaaaaaaggaaagaaagaaagaaaagaaaagaaaatccctttttgctttaacttgcccttgcaggtttgtagaaactcaattgttgaaatttgggtggataaatttctggattttctatctattccatgttggaccaataccacactgccctagtcactgttgcattatagtatatctttaaaggagtaatgggaatccttcaactacatttttttccccaataatttttggctattctgcttcttttgtgtttctatgtaaattttatcatcagtgtgtctatttctacaaatagtcctgatagggtttgaattgggatttctgtgaatctatagatcaatctgaggagacttaataatgatattgattctcccaattcatgaatatagtatacccctgtatttatttgttttcttgaatttcttttatcattgttttgtagttttcaccatgacagtcttgcacatatt

SEQ ID NO: 668 - DNA, 342 bp, Homo sapiens
caaaggcattacctgcctcatcgatattataggggtccatcacaacccaactgtgtggccggatcctgaggtctacgaccccttccgctttgacccagagaacagcaaggggaggtcacctctggcttttattcctttctccgcagggcccaggaactgcatcgggcaggcgttcgccatggcggagatgaaagtggtcctggcgttgatgctgctgcacttccggttcctgccagaccacactgagccccgcaggaagctggaattgatcatgcgcgccgagggcgggctttggctgcgggtggagcccctgaatgtaggcttgcagtgactttctgaccc

SEQ ID NO: 669 - DNA, 463 bp, Homo sapiens
gagagattatttctgtggtctaaaggttaaaaagccaacaacctgttaccaattatttcagctttttttgttttaataagtgtgacaacttaaaacttgtttctatttaaagtgaaatgtatctttcaactgtttagttacccagctgtttaatattccagtcttcccaaagtgaaaagatttgtatacaaatgttttctatgatttaataaaaatatatggcacaaaaaaccacttcgccgggtcgcgccccgacggccgggcccgggagacgcgccggcagccccggcaccttgccaaagtttcaaacccgggaaaataaacgtaagctaaggatcccccccatgtatccaacctcatgctctatgggacccaggccatccccgtgaggttctccagatcctccatgccttggacgaaaggtgttggatcactggtgcatcatgacaccaaatctatagtt

SEQ ID NO: 670 - DNA, 459 bp, Homo sapiens
tgagcctggggttctggtgttagaatatttttaagtaggctttactgagagaaactaaatattggcatacgttatcagcaacttcccctgttcaatagtatgggaaaaataagatgactgggaaaaagacacacccacaccgtagaacatatattaatctactggcgaatgggaaaggagaccattttcttagaaagcaaataaacttgatttttttaaatctaaaatttacattaatgagtgcaaaataacacataaaatgaaaattcacacatcacatttttctggaaaacagacggattttacttctggagacatggcatacggttactgacttatgagctaccaaaactaaattctttctctgctattaactggctagaagacattcatctatttttcaaatgttctttcaaaacatttttataagtaatgtttgtatctatttcatgctttact

SEQ ID NO: 671 - DNA, 265 bp, Homo sapiens
ccggaaccgacgagtcctgaggagagaaccggtgcgtcctgaggagagaaccggcgctgggcaacacgggcctgcaaactcgacaggaccctgcccgaggggccctcgcgccaacctggaccggtccccgcctcctccgctgcccaatctctcagacccaccccacctgcaggcccagaccacgtgggacagaactcctgcccaccctaccccgagggaggcgaacccgcacttccaggcttgggaggaccatggggcacaatgc

SEQ ID NO: 672 - DNA, 478 bp, Homo sapiens
gagtggaatgcttcctagaagttactgaatgcaccatggtcaaaacggattagggcatttgagaaatgcatattgtattactagaagatgaatacaaacaatggaaactgaatgctccagtcaacaaactatttcttatatatgtgaacatttatcaatcagtataattctgtactgatttttgtaagacaatccatgtaaggtatcagttgcaataatacttctcaaacctgtttaaatatttcaagacattaaatctatgaagtatataatggtttcaaagattcaaaattgacattgctttactgtcaaaataattttatggctcactatgaatctattatactgtattaagagtgaaaattgtcttcttctgtgctggagatgttttagagttaacaatgatatatggataatgccggtgagaataagagagtcataaaccttaagtaagcaacagcataacaaggtccaagat

SEQ ID NO: 673 - DNA, 513 bp, Homo sapiens
  misc_feature (215)..(215): n is a, c, g, or t
aatcacccaaggatggatatcaggagaatatctctggaaaatacatacaaactgtttattcaacttctgataggtctgtcattgaaagagatatgtgcacttactgccgaaaacccttgggtgtagaaactaaaatgattttagatgaattacaaatttgctgccattctacttgctttaagtgtgaaatatgcaagcagcctttggaaaatctncaagcgggtgatagtatttggatttatagacagacaatacactgtgaaccttgctactctaaaattatggcaaagtggattccataactctggcacaaggaaatcaagatgaaaagcactcattaaggaattaaagttacaagttttatcttaataatatgtaatctagaaaagctttcacattgaagatcaactcttgtacaaaattaacaattctgttattgcataagtaatctaattgtcttcaataaggtcacacacataaaaagagccatctggtctctggctagagttagca

SEQ ID NO: 674 - DNA, 514 bp, Homo sapiens
gaatattttccacaagatgctgcaatgtgagttatcacttcatttatcttaaagaaagactaaactggttgtcagttacatctgacagaaaaaaaaaaaaaatcactgtgtaaccaggttaagtggtaaaataatccagggcgtcagtcaaaggcattttgctgactttaatattgattatatttttaacagggaatttaaggaaaatattacctgggaattaaaaaatatatatatattaaaacaagaattttcctttgcctctgtctagcttaaacctactacctcaagctgcttaagttccttaagtattgtttgtaatcaccaataaataagtgcatttgtaattcatcagtcattattagcttttattaaaagaagattacgttttacaatgtaactataatctcttgaatttggtatcttattaatgagttttaaagatgtaaaacctaaccttttttaaagctccattgtcttatgtttttagaggcttttccgtaaacatatatct

SEQ ID NO: 675 - DNA, 387 bp, Homo sapiens
tccagcggaggccacaagtcctcctcttccgggtccgtgggcgagtcttcatctaagggaccaagatactaacaaaaccagagtaatcaagacaattattgaagaggtggcgcccgacggtagagttctttcatctacggttgaatcagaaaccaagaaacactactattaaactgcatgaatctcccttcacacagaccattatttacagatgcatggaaaacaaagtctccaagaaaacacttctgtcttgatggtctatggaaatagaccttgaaaataaggtgtctacaaggtgttttgtggtttccgtatttcttcttttcactttaccagaaagtgttctttaatggaaagaaaaacaactttctgttctcatttactaat

SEQ ID NO: 676 - DNA, 520 bp, Homo sapiens
ttcaccatggaccgggaagtgcgcaaaatcaaacaaggcctgggcttgaaatttgctgagctggtgtataccggtttacggcctagccctgagtgtgaatttgtccgccactgcatcgccaagtcccaggagcgagtggaagggaaagtgcaggtgtccgtcctcaagggccaggtgtacatcctcggccgggagtccccactgtctctctacaatgaggagctggtgagcatgaacgtgcagggtgattatgagccaactgatgccaccgggttcatcaacatcaattccctcaggctgaaggaatatcatcgtctccagagcaaggtcactgccaaatagacccgtgtacaatgaggagctggggcctcctcaatttgcagatcccccaagtacaggcgctaattgttgtgataatttgtaattgtgacttgttctccccggctggcagcgtagtggggctgccaggccccagctttgttccctggtccccctgaagcctgcaaacgttgtcatcgaa

SEQ ID NO: 677 - DNA, 465 bp, Homo sapiens
gcactatggtttgttgcctacctagctgcatctataatgtcagcttatcctaaggctgtccacgtacttaatttacttaagtgttcattttaagtaacgtgctcactgtgtataggaatttgtattttggaggtgcttgatctatctacaaaagaaaaaattaattaggaattactttattataaaatgctcctagaagtcttaattgtgtttattttttaaaaaaacaaatgttagacttgtgtgcatggaagtaattaaggtacatcattattgtagtttgaaagttgtacatgataagacattttgtttttactgtatgtttttactgaatgatctattccccatcccaaggcaagcatgaataaaattaggttaaacgtagcatgtggcatcgcagtctcttagaatttgtttcatctattttattttattgaatactgtctgtatctttggttatcctgt

SEQ ID NO: 678 - DNA, 548 bp, Homo sapiens
agtctgctgaagaggcattgcacagatcaaacaaggatggatcatttcttattcggaaaagctctggccatgattccaaacaaccatatacactagttgtattctttaataagcgagtatataatattcctgtgcgatttattgaagcaacaaaacaatatgccttgggcagaaagaaaaatggtgaagagtactttggaagtgttgctgaaatcatcaggaatcatcaacatagtcctttggttcttattgacagtcagaataacacaaaagattccaccagactgaagtatgcagttaaagtttcataaagggggaaaaaaaagatcaataccattgcttcagacactttcccaaagtttctccttttgagaaaaagtcccaaaacttcatattttggattatgaatcatccagtaataaaatggaagatggagtcagctattgaagtggtcatccatttctttttaagaagctcatgtggacttgttctattgcctgacctgatgaactgttaatatctggtgaggttgagttatcatgctacta

SEQ ID NO: 679 - DNA, 345 bp, Homo sapiens
gggattggcagcggctgcatcatcagtggcgggggctccgtctgcggaggtggttcctctggaggcggcggcggcggctcctccgtgggtggctccgggagtggcaagggcgtcccgatctgccaccagacccagcagaagcaggcgcctacctggccgtccaaatagatcccccagggtaccacggaggcgaaggagttggaggtgttttccaggggcaccgatgggcttagagctctcatgatgctacccgaggtttgcaaatccttcatgtcttaacctacctggaagaagccattgagctctccggctgcatctagttctgctgtttagcctctttggttt

SEQ ID NO: 680 - DNA, 474 bp, Homo sapiens
ttattcttagcgtcactggtctggctttcagaattaacatacaaggttgccacacctagttctgcccagctttatgtcttttattccagtattccaccaaagtttgttttcctgcattccagttctcaagtcttaagataaagattgtacttgacagtttagtatatccataaaactatttgaggtggttaaggttcttgggttcattttccttaatactttgctgaatattgtagattgtaggcaatgaaaaagtctactaaattaggaaaaccttgaataattaggtatcctaggtaagagcccctaaacatcaagcaatctgtgagtctgtaaagaaataaatattttttggattattcttatctaattccacccctgttggaagatgatttctttgttctttgcaactatggaagctgtgaaaatcatcacaagtgcctctgaaagcgagtgttaggttggttagagggt

SEQ ID NO: 681 - DNA, 479 bp, Homo sapiens
gctggaggtgacgctactgagaactttgaggatgtcgggcactctacagatgccagggaaatgtccaaaacattcatcattggggagctccatccagatgacagaccaaagttaaacaagcctccagaaccttaaaggcggtgtttcaaggaaactcttatcactactattgattctagttccagttggtggaccaactgggtgatccctgccatctctgcagtggccgtcgccttgatgtatcgcctatacatggcagaggactgaacacctcctcagaagtcagcgcaggaagagcctgctttggacacgggagaaaagaagccattgctaactacttcaactgacagaaaccttcacttgaaaacaatgattttaatatatctctttctttttcttccgacattagaaacaaaacaaaaagaactgtcctttctgcgctcaaatttttcgagtgtgcctttttattcatctacttt

SEQ ID NO: 682 - DNA, 460 bp, Homo sapiens
tgaagcttttggttccagcgtgaccttctcttttagataaagatgagcccccaccaccaccgactctcccaacccagactctcccactccagaatgtagaagcctgtctctgtacctctaactggcagcaagttaaatttttgtcatttatctctgatggcactttgagggaaaagaatgtccacatacagtttttgaaagatcttctctccaaaccagttagttagagccagtgacgcctctgtgttctggggcggaatctgtgctgtctaggtttgtgcttctagccatgcccattcccgcccccaccatgcctctttgcattgcccattttccagatgtgtattctgttgaggacccaggcccatccagggatttcatctctaagcctggcagtgctggggggaaatgtgtttctgtgtatatagctcctcttgtccactctgctttcggaagtgct

SEQ ID NO: 683 - DNA, 493 bp, Homo sapiens
gtgagttatcacttcatttatcttaaagaaagactaaactggttgtcagttacatctgacagaaaaaaaaaaaaaaatcactgtgtaaccagggttaagtggttaaaataatccagggcgtcagtcaaaggcattttgctgactttaatattgattatatttttaacagggaatttaaggaaaatattaccggggaattaaaaaatatatatatattaaaacaagaattttcctttgcccctgtccagcctaaacctacctacctcaaggctgcctaagttcctaagtattgtttgtaatcacccaataaataagtgcatttgtaattcatcagtcattattagcttttattaaaagaagattacgttttacaatgtaactataatctcttgaatttggtatcttattaatgagttttaaagatgtaaaacctaaccttttttaaagctccattgtcttatgtttttagaggcttttccgtaaacatatatct

SEQ ID NO: 684 - DNA, 343 bp, Homo sapiens
aaggaagagtctaggctgagcaacatgaaggggcccccaaccttctgcagcctcctgctgctgtcattgctcctgagcccagaccctacagcagcattcctactgccacccagcactgcctgctgtactcagctctaccgaaagccactctcagacaagctactgaggaaggtcatccaggtggaactgcaggaggctgacggggactgtcacctccaggctttcgtgcttcacctggctcaacgcagcatctgcatccacccccagaaccccagcctgtcacagtggtttgagcaccaagagagaaagctccatgggactctgcccaagctgaattttggga

SEQ ID NO: 685 - DNA, 522 bp, Homo sapiens
ctaaaatttgttaccacatcattgcttcctttctacaggacgaattgaggcttaaactttactgttaatgatactggttcattttaatgtgcttgttggtatgttgctatttttcatttcatagctttcaaaaatcatgctaattgtatacttgtctagtttaaggctattttaaaatatgtacaatactattcacagcatttagttcgtttaatttttattataaagcaatctactaaaaaagtacaactgtatttgaacttttcaatagttgtttgtgagctatgataatcaaaagtcattaaagtcttttttaacaaacattcgtgcttacttttcaacataattcccagttatatacagaaaaagatttccacctgtcacgtatctgcctcttttacctgagcaatggtgtagttcttagacctaaggtctgtaattgcaatacttttaaagaaagatgttgctctaagtgctgtttgttagttatgaaatcagatttttctgcttgttcttaatgct

SEQ ID NO: 686 - DNA, 555 bp, Homo sapiens
catttactacagtgtctcagccttgataaagggcagtggattgcctgttgttcggtgttgtgaatagcacctctgaataagattagagtgtttcttaattcatttcaaactctaaaattagattaatggtggtgctaagaaagagtattaattactttgggaatggtcaaaattaacattaaaaacattttagacaaaaagtttcattgtacattcaaagaaaatgtaagtttggaagtactaaaagactattttatacttgttgattaatcggaatgtttgttgtatgccttcattttccatttcacttatatgtgcatgtccatatatgttaattttcattgtagcaaagctaatggaaataaagctaatgctctagttgaaagaaaaggaaaactcctgaaatcctagaatgtcttgttatttttagctgactgtaaaatattatgaacagtctttgtgtattgtgcttaatgcttttgtaagaaacagaatttgaaatatttcatccttgtcatgctcaaaattttgttacatgcttgttattcagagtat

SEQ ID NO: 687 - DNA, 455 bp, Homo sapiens
gaaatttttgtcactcccagaggtgagacaagccatccacgtggggaatcagacttttaatgatggaactatagttgaaaagtacttgcgagaagatacagtacagtcagttaagccatggttaactgaaatcatgaataattataaggttctgatctacaatggccaactggacatcatcgtggcagctgccctgacagagcactccttgatgggcatggactggaaaggatcccaggaatacaagaaggcagaaaaaaaagtttggaagatccttaaatctgacagtgaagtggctggttacatccggcaagcgggtgactcccatcaggtaattattcgaggtggaggacatattttaccctatgaccagcctctgagagcttttgacatgattaatcgattcatttatggaaaaggatgggatccttatgttggataaactaccttcccga

SEQ ID NO: 688 - DNA, 382 bp, Homo sapiens
gatagcaaacactgggggcaccttaagattttgcacctgtaaagtgccttacagggtaactgtgctgaatgctttagatgaggaaatgatccccaagtggtgaatgacacgcctaaggtcacagctagtttgagccagttagactagtcccccggtctcccgattcccaactgagtgttatttgcacactgcactgttttcaaataacgattttatgaaatgacctctgtcctccctctgatttttcatattttcctaaagtttcgtttctgttttttaataaaaagctttttcctcctggaacagaagacagctgctgggtcaggccacccctaggaactcagtcctgtactctggggtgctgcctgaatccattaaaaat

SEQ ID NO: 689 - DNA, 451 bp, Homo sapiens
agcaggtctcccacgagtaatggtgggagaagccgggcctacatgcccccgcggagccgcagccgggacgacctctatgaccaagacgactcgagggacttcccacgctcccgggacccccactacgacgacttcaggtctcgggagcgccctcctgccgaccccaggtcccaccaccaccgtacccgggaccctcgggacaacggctccaggtccggggacctcccctatgatgggcggctactggaggaggctgtgaggaagaaggggtcggaggagaggaggagaccccacaaggaggaggaggaagaggcctactacccgcccgcgccgcccccgtactcggagaccgactcgcaggcgtcccgagagcgcaggctcaagaagaacttggccctgagtcgggaaagtttagtcgtctgatctgacgttttctacgtagcttttgtat

SEQ ID NO: 690 - DNA, 358 bp, Homo sapiens
ggagcagtggactgccacaagccaccatgtaacccctctcacctgccgtgcgttctggctgtggaccagtaggactcaaggtggacgtgcgttctgccttccttgttaattttgtaataattggagaagatttatgtcagcacacacttacagagcacaaatgcagtatataggtgctggatgtatgtaaatatattcaaattatgtataaatatatattatatatttacaaggagttattttttgtattgattttaaatggatgtcccaatgcacctagaaaattggtctctctttttttaatagctatttgctaaatgctgttcttacacataatttcttaattttcaccgagcag

SEQ ID NO: 691 - DNA, 473 bp, Homo sapiens
cccctgaacgtgttttgcgacatggagactgatgggggcggctggctggtgttccagcgccgcatggatggacagacagacttctggagggactgggaggactatgcccatggttttgggaacatctctggagagttctggctgggcaatgaggccctgcacagcctgacacaggcaggtgactactccatgcgcgtggacctgcgggctggggacgaggctgtgttcgcccagtacgactccttccacgtagactcggctgcggagtactaccgcctccacttggagggctaccacggcaccgcaggggactccatgagctaccacagcggcagtgtcttctctgcccgtgatcgggaccccaacagcttgctcatctcctgcgctgtctcctaccgaggggcctggtggtacaggaactgccactacgccaacctcaacgggctctacgggagcacagtggaccatcaggg

SEQ ID NO: 692 - DNA, 521 bp, Homo sapiens
tagcccttgtttttaacacacgctccagcccttcatcagcctgggcagtcttaccaaaatgtttaaagtgatctcagaggggcccatggattaacgccctcatcccaaggtccgtcccatgacataacactccacacccgccccagccaacttcatgggtcactttttctggaaaataatgatctgtacagacaggacagaatgaaactctgcgggtctttggcctgaaagttgggaatggttgggggagagaagggcagcagcttattggtggtcttttcaccattggcagaaacagtgagagctgtgtggtgcagaaatccagaaatgaggtgtagggaattttgcctgccttcctgcagacctgagctggctttggaatgaggttaaagtgtcagggacgttgcctgagcccaaatgtgtagtgtggtctgggcaggcagacctttaggttttgctgcttagtcctgaggaagtggccactcttgtggcaggtgtagtatctggggcgagtgttgggg

SEQ ID NO: 693 - DNA, 388 bp, Homo sapiens
ctgggattacaggcttgagcccccgcgcccagccatcaaaatgctttttatttctgcatatgtttgaatactttttacaatttaaaaaaatgatctgttttgaaggcaaaattgcaaatcttgaaattaagaaggcaaaatgtaaaggagtcaaactataaatcaagtatttgggaagtgaagactggaagctaatttgcataaattcacaaacttttatactctttctgtatatacattttttttctttaaaaaacaactatggatcagaatagccacatttagaacactttttgttatcagtcaatatttttagatagttagaacctggtcctaagcctaaaagtgggcttgattctgcagtaaatcttttacaactgcctcgaca

SEQ ID NO: 694 - DNA, 565 bp, Homo sapiens
aatgctcagaagttgcctatgtgtgacaaatgtggcactgggattgttggtgtgtttgtgaagctgcgggaccgtcaccgccaccctgagtgttatgtgtgcactgactgtggcaccaacctgaaacagaagggccatttctttgtggaggatcaaatctactgtgagaagcatgcccgggagcgagtcacaccacctgagggttatgaagtggtcactgtgttccccaagtgagccagcagatctgaccactgttctccagcaggcctctgctgcagctttttctctcagtgttctggccctctcctctcttgaaagttctctgcttactttggttttccctctgcttgtaaaacattgagtcccctccctgccttggttaattgactcacaccagctgtgcgatgcccgcttttacaattaaaggaaaactgttttgttcagtgtcaccttgtcagcaacactgtgtcccttcgccccaccgttcttctctgctgcatttggacatcagccaaatttgaacccaatcaaatataacgtgtctgacactgattttgtttttact

SEQ ID NO: 695 - DNA, 564 bp, Homo sapiens
tagaccatctccatttttagcacttggcagcctcatgatccttttataaatgtgagattaacaggagagcagcaatacgattttgccaatggaataacagatttgccggcattcactgaaagagggcagatattgggtccttgtaacttcaactgactcttccaaattgtatgaatttatcaatgtattacacaaatccagtttcagaatgataaaaaatgttagaccaaataatgcggctaattaacagtcgtatgatttctagcccatgggtttaaaactgtatcttaaagagtcattttaaaataatataaatattaaaaaatgtaactgctatcttaatgttctgaaataaaacattttaaaatataaatcctgtagtttaaaaggaagaaatggtgggaaggaaaagtagagaaagaaatgccaattacaggccaaagcgttatttgccaagttttcttagaatgaattttaccaatgtatgagttcttgttaacagaatgtgtaacggaaatactgaaagacttttgcttaaagtggcattattgactgctgatgtga

SEQ ID NO: 696 - DNA, 480 bp, Homo sapiens
  misc_feature (431)..(431): n is a, c, g, or t
gaaggctggattctatctacataagtcctttcaattccaccagggccagagcagctccaccactgtgcacttagccatgatggcaacagaaaccaagagacacaattacgcaggtatttagaagcagagggacaaccagaaggcccttaactatcaccagtgcatcacatctgcacactctcttctccattccctagcaggaacttctagctcatttaacagataaagaaactgaggcccacggtttcagctagacaatgatttggccaggcctagtaaccaaggccctgtctctggctactccctggaccacgaggctgattcctctcatttccagcttctcagtttctgcctgggcaatggccaggggccaggagtggggagagttgtgatggaggggagaggggtcacacccaccccctgcctggttntaggctgctgcacaccaaggccctgcatctgtctgctctgcatatatgt

SEQ ID NO: 697 - DNA, 525 bp, Homo sapiens
atttagtcaactggcccaaggcagcgaggcttctacagtcccacaccccatagccgcctgggctggggcttactgggggctgaaggttctggacatgaacaagggtcaggtagaagagaaaggcttcccctacaccccagcctcctgctgtcccctgaagcccaggactgcgttgtatgctttccatccactcaccttaccccatagcatcttgcggcccagaaaccagagccatttgtctcagaccctaaatcaataatcacaaaccccaaaacgggagagagcagtgaaaacatgcagggctgtggacgggggaagggttgtggcgggtgttctgaggctgagaggacacctatatgcgtatttcctctacacacatcaccccccttctataatcttaagccatgactagcctggtggcgtgttagtttctgcccagttctaccccctcatgtgcttcttctgaatactgaatgtgactgtttgaaagctggtagaattcatccctcttactgtagataacac

SEQ ID NO: 698 - DNA, 552 bp, Homo sapiens
atgtcatccgtatttcaaccggagtaaattgctagatttctgcaagtcgaaagatattgttctggttgcctatagtgctctgggatctcaacgagacaaacgatgggtggacccgaactccccggtgctcttggaggacccagtcctttgtgccttggcaaaaaagcacaagcgaaccccagccctgattgccctgcgctaccagctgcagcgtggggttgtggtcctggccaagagctacaatgagcagcgcatcagacagaacgtgcaggtttttgagttccagttgactgcagaggacatgaaagccatagatggcctagacagaaatctccactattttaacagtgatagttttgctagccaccctaattatccatattcagatgaatattaacatggagggctttgcctgatgtctaccagaagccctgtgtgtggatggtgacgcagaggacgtctctatgccggtgactggacatatcacctctacttaaatccgtcctgtttagcgacttcagtcaactacagctgagtccataggccagaaag

SEQ ID NO: 699 - DNA, 503 bp, Homo sapiens
ttacagtgcagtttagttaatctattaatactgactcagtgtctgcctttaaatataaatgatatgttgaaaacttaaggaagcaaatgctacatatatgcaatataaaatagtaatgtgatgctgatgctgttaaccaaagggcagaataaataagcaaaatgccaaaaggggtcttaattgaaatgaaaatttaattttgtttttaaaatattgtttatctttatttatttgggggtaatattgtaagttttttagaagacaattttcataacttgataaattatagttttgtttgttagaaaagtagctcttaaaagatgtaaatagatgacaaacgatgtaaataattttgtaagaggcttcaaaatgtttatacgtggaaacacacctacatgaaaagcagaaatcggttgctgttttgcttctttttccctcttatttttgtattgtggtcatttcctatgcaaataatggagcaaacagctgtatagttgtagaat

SEQ ID NO: 700 - DNA, 497 bp, Homo sapiens
gtgaaacaattccagggcatgcccccttgcacatacacaatgccaagtcagtttcttccacaacaggccacttactttcccccgtcaccaccaagctcagagcctggaagtccagatagacaagcagagatgctccagaatttaaccccacctccatcctatgctgctacaattgcttctaaactggcaattcacaatccaaatttacccaccaccctgccagttaactcacaaaacatccaacctgtcagatacaatagaaggagtaaccccgatttggagaaacgacgcatccactactgcgattaccctggttgcacaaaagtttataccaagtcttctcatttaaaagctcacctgaggactcacactggtgaaaagccatacaagtgtacctgggaaggctgcgactggaggttcgcgcgatcggatgagctgacccgccactaccggaagcacacaggcgccaagcccttccagtgcggggtgtgcaaccg

SEQ ID NO: 701 - DNA, 505 bp, Homo sapiens
tgaacgaatttattttcccctcagtttttgagggcattaaaaaggcattaaatcaagacaaatcatgtgcttgagaaaaataaaattaatgaaaacacagcacttatgttggtttagctgcagcctccttggaggtagaatttatttatttaaaattactggttgcatcaagaacccatagggtgtacaaaaggttctataaaatctgcattatagagacaaagaggcaggcaaatccatgtcacaagggtaaagcttacagtttacaaactgggaacgccagggtgtaggatataaaaacgcactcttgagaaaacaaatgtaatcagggtgctgaaaacttgcatggtgctttcagacattagccttgttcaacaaatttcttgtattgacagatccatagtgtgcatgggcagacacattttgcctctatgtctcttaaaattttaattaaaaatactctttccagtaatcctaatttgcacgaagatataatgtccacatt

SEQ ID NO: 702 - DNA, 450 bp, Homo sapiens
gcagcacttacaatcactaattcccttaaggttgaaactgtaatgacataaaaagggtcgatgatatttcactgatggtagatcgcagcccctgcaacgtagcctttgttacatgaagtccgctgggaaatagatgttctgtctctatgacaatatattttaactgactttctagatgccttaatatttgcatgataagctagttttattggtttagtattcttgttgtttacgcatggaatcactattcctggttatctcaccaacgaaggctaggaggcggcgtcagaggtgctgggtgacagagccatgagccagccattttataagcactctgatttctaaaagttaaaaaaaatatatgaaatctctgtagcctttagttatcagtacagatttattaaatttcggcccttaacccagccttttccagtgtgtaacccagtttga

SEQ ID NO: 703 - DNA, 542 bp, Homo sapiens
tgcggaaatacctgaaatacagcaaaaatatcctggaccggcaagatcctccctctgtggtggtcaccagccaccaggccccaggagaaaagaagaaactgaagtgcctggcctacgacttctacccagggaaaattgatgtgcactggactcgggccggcgaggtgcaggagcctgagttacggggagatgttcttcacaatggaaatggcacttaccagtcctgggtggtggtggcagtgcccccgcaggacacagccccctactcctgccacgtgcagcacagcagcctggcccagcccctcgtggtgccctgggaggccagctaggaagcaagggttggaggcaatgtgggatctcagacccagtagctgcccttcctgcctgatgtgggagctgaaccacagaaatcacagtcaatggatccacaaggcctgaggagcagtgtggggggacagacaggaggtggatttggagaccgaagactgggatgcctgtcttgagtagacttggacccaaaaaatcatctcaccttgagccca

SEQ ID NO: 704 - DNA, 503 bp, Homo sapiens
gaattctcgaactgcatgtattgtgccaatctgtcctgagtgttcatgctttgtaccaaatttaatgaacgcgtgttctgtaatcaaactgcaaatattgtcataaccaacatccaaaatgacggctgctatatataagtgtttgtcatatggaatttaatcgtaagccatgatcataatgttaactaaataactttatgtggcactgcctagtaagggaactatggaaaggtttggatttctccaaatctgggagaattttcaaaataagaaaataacctttatatgatatactatgactaggctgtgtatttcttttcagggatttttctaccttcagggttggatgtagtttagttactattaccatagccaacctgtagttttacatatacattttcttgtggagcaatagagttctccattttacagaagcattttaaatgtagtttgaatattttccacaagatgctgcaatgtgagttatcacttcatttatctta

SEQ ID NO: 705 - DNA, 396 bp, Homo sapiens
  misc_feature (148)..(149): n is a, c, g, or t
  misc_feature (151)..(154): n is a, c, g, or t
  misc_feature (156)..(156): n is a, c, g, or t
agtcaaatgccaaacactagctctgtattaatccccatcattactggtaaagcctcatttgaatgtgtgaattcaatacaggctatgtaaaatttttactaatgtcattattttgaaaaaataaatttaaaaatacattcaaaattannannnnanacaagcttaattgttaatattccctaaacacaattttatgaagggagaagacattggtttgttgacaataacagtacatcttttcaagttctcagctatttcttctacctctccctatcttacatttgagtatggtaacttatgtcatctatgttgaatgtaagcttataaagcacaaagcatacatttcctgactggtctagagaactgatgtttcaatttacccctctgctaaataaa

SEQ ID NO: 706 - DNA, 49 bp, Homo sapiens
gtctttgctataccactgactgtattgaaaaccaaagtattaagagggg

SEQ ID NO: 707 - DNA, 262 bp, Homo sapiens
ggatcgcagtcatccagagatgtgacctcctccagccgccaaatccgcaccaaggtcatggatgtgcacgatggcaaggtggtgtccacccacgagcaggtccttcgcaccaagaactgaggctgcccagccccgctcaggcctaggaggccccccgtgtggacacagatcccactggaagatcccctctcctgcccaagcacttcacagctggaccctgcttcaccctcaccccctcctggcaatcaatacagcttcatta

SEQ ID NO: 708 - DNA, 396 bp, Homo sapiens
ggcaaactgcttaatcttgtggattttgtagatggtttcaaatgactgaactgcattcagatttacgagtgaaaggaaaaattgcattagttggttgcatgaactttgaagggcagatattactgcacaaactgccatctcgcttcatttttttaactatgcatttgagtacagactaatttttaaaatatgctaaactggaagattaaacagatgtggcccaaactgttctggatcaggaaagtcatactgttcactttcaagttggctgtcccccccgccgcccccccccacccccatatgtacagatgataatagggtgtggaatgtcgtcagtggcaaacatttcacagattattttgtttctgtcttcaacatttttgacactgtgctaat

SEQ ID NO: 709 - DNA, 455 bp, Homo sapiens
gctggaggtgacgctactgagaactttgaggatgtcgggcactctacagatgccagggaaatgtccaaaacattcatcattggggagctccatccagatgacagaccaaagttaaacaagcctccggaaactcttatcactactattgattctagttccagttggtggaccaactgggtgatccctgccatctctgcagtggccgtcgccttgatgtatcgcctatacatggcagaggactgaacacctcctcagaagtcagcgcaggccgagcctgctttggacacgggagaaaagaagccattgctaactacttcaactgacagaaaccttcacttgaaaacaatgattttaatatatctctttctttttcttccgacattagaaacaaaacaaaaagaactgtcctttctgcgctcaaatttttcgagtgtgcctttttattcatctacttt

SEQ ID NO: 710 - DNA, 501 bp, Homo sapiens
gaacagaacctgagtcgtcggactttcaaaagcctcttcagagcaagcgatgagagtgttttatccatgcataaagtctgtgaagcgggaggactttttgtaaatagcccagaagagcccagcctcagcaggatggtcactgaggaggaaatccagttctatgtgcagcagttcaagaagtctggtttcagaggtcctctaaactggtaccgaaacatggaaaggaactggaagtgggcttgcaaaagcttgggacggaagatcctgattccggccctgatggtcacggcggagaaggacttcgtgctcgttcctcagatgtcccagcacatggaggactggattccccacctgaaaaggggacacattgaggactgtgggcactggacacagatggacaagccaaccgaggtgaatcagatcctcattaagtggctggattctgatgcccggaacccaccggtggtctcaaagatgtagaacgcagcgtgtgcccacgct

SEQ ID NO: 711 - DNA, 379 bp, Homo sapiens
gttttcactgcttgtatgatgtttcccattcatacacctataaatctctaacaagaggccctttgaactgccttgtgttctgtgagaaacaaatatttacttagagtggaaggactgattgagaatgttccaatccaaatgaatgcatcacaacttacaatgctgctcattgttgtgagtactatgagattcaaatttttctaacatatggaaagccttttgtcctccaaagatgagtactagggatcatgtgtttaaaaaaagaaaggctacgatgactgggcaagaagaaagatgggaaactgaataaagcagttgatcagcatcattggaacatggggacgagtgacggcaggaggaccacgaggaaataccctca

SEQ ID NO: 712 - DNA, 256 bp, Homo sapiens
aatcctgtaccaaatctgacatattatgcctgaatgactccactgtttttctctaatgcttgatttaggtagccttgtgttctgagtagagcttgtaataaatactgcagcttgagaaaaagtggaagcttctaaatggtgctgcagatttgatatttgcattgaggaaatattaattttccaatgcacagttgccacatttagtcctgtactgtatggaaacactgattttgtaaagttgcctttatttgctgtt

SEQ ID NO: 713 - DNA, 423 bp, Homo sapiens
  misc_feature (369)..(370): n is a, c, g, or t
atagtaccagtaggggcttataataaaggactgtaatcttatttaggaagttgacttatagtacatgataaatgatagacaattgaggtaagttttttgaaattatgtgacattttacattaaattttttttacattttttgggcagcaatttaaatgttatgactatgtaaactacttctcttgttaggtaatttttttcacctagatttttttcccaattgagaaaaatatatactaaacaaaatagcaataaaacataatcactctatttgaagaaaatatcttgttttctgccaatagattttttaaaatgtagtcagcaaaatgggggtggggaagcagagcatgtcctagttcaatgttgacnntttttttttttttaaagaaaagcattaagacataaaattctttcactttggca

SEQ ID NO: 714 - DNA, 398 bp, Homo sapiens
  misc_feature (42)..(42): n is a, c, g, or t
  misc_feature (103)..(103): n is a, c, g, or t
  misc_feature (164)..(164): n is a, c, g, or t
  misc_feature (225)..(225): n is a, c, g, or t
  misc_feature (286)..(286): n is a, c, g, or t
  misc_feature (347)..(347): n is a, c, g, or t
tacatcttgccagaaggtttccctcgccaacaaacagttganaatttaagggaagaagcaaaagctaaactgtctttgaccctaagatagatagaaagctatnttatttgtcttcagtgttcaaggcatgactagtatttctaattagcctaataaattcccancactttctgaagtgaacactaatggtattgtcctactaaaactgtcattgtttcttttttntttaactggtcagtcattcacaataagctatgagggtaaataaatatgtgttataacaagntaaaccgtagttgcaagaatataccatgaagattaaagtaggctgggtttcatttccatcnttcccacacatctcattgaatttgatggttgacttaattggcaccataact

SEQ ID NO: 715 - DNA, 480 bp, Homo sapiens
  misc_feature (207)..(208): n is a, c, g, or t
tacttaggtcaaatttctgttctctcttccccaaataatattaaagtattatttgaactttttaagatgaggcagttcccctgaaaaagttaatgcagctctccatcagaatccactcttctagggatatgaaaatctcttaacacccaccctacatacacagacacacacacacacacacacacacacacacacacacacacacannttcaccctaaggatccaatggaatactgaaaagaaatcacttccttgaaaattttattaaaaaacaaacaaacaaacaaaaagcctgtccacccttgagaatccttcctctccttggaacgtcaatgtttgtgtagatgaaaccatctcatgctctgtggctccagggtttctgttactattttatgcacttgggagaaggcttagaataaaagatgtagcacattttgctttcccatttattgtttggccagctatgccaatgtggtgcta

SEQ ID NO: 716 - DNA, 559 bp, Homo sapiens
taccctcgcagcagtgtctctgaggactagcaaagtctggaggcagatgaatggtttctgaccctcaccagggctgtggaagggtgggggtgggtcattatagtattcaggatttacagtgcagtattcacgtgtaacttttaagttttcagtacagtgcttttatacctttaatgcaatgttgtattcatttgggtactattgtgtagtatttaggatgtatgcatgtttgtttatatgtaagcttggttggtgctttcgcttttgtgctacctttcttggatttttgtaccagagatgtgctaaactgatgaaatacattgagaaagtttccatcttattcttttatatgggactgatgatgtgtgttggggtagactgctcctgcagagtttggaagaagtcaccagcaaagccggcctaaccaagaaaagtcaaggcccttcatgaccttgctgggcacagaaaacaccctcgtggagtacactaatttgaactggactggtctcagtgtgagcacttggcacactttactaaacacatatacaaccccaccgtg

SEQ ID NO: 717 - DNA, 382 bp, Homo sapiens
tccagccctccggagagtgggcttggccctaggccctccagctcagccagaaaaagcccagaaacccaggtgctggaccagggccctcagggaggggaccctgcggctagagtgggctaggccctggctttgcccgtcagatttgaacgaatgtgtgtcccttgagcccaaggagagcggcaggaggggtgggaccaggctgggaggacagagccagcagctgccatgccctcctgctccccccaccccagccctagccctttagcctttcaccctgtgctctggaaaggctaccaaatactggccaaggtcaggaggagcaaaaatgagccagcaccagcgccttggctttgtgttagcatttcctcctgaagtgttctgt

SEQ ID NO: 718 - DNA, 486 bp, Homo sapiens
  misc_feature (77)..(77): n is a, c, g, or t
  misc_feature (351)..(351): n is a, c, g, or t
  misc_feature (457)..(457): n is a, c, g, or t
ggtgatcgaaaactgtggccatgtggaacccggtcttgtgggggactgtttctccatcttgactcagacagttcctnggaaacaccggggctctgtttttattttctttgatgtttttcttctttagtagcttgggctgcagcctccactctctagtcactggggaggagtattttttgttatgtttggtttcatttgctggcagagctggggctttttgtgtgatccctcttggtgtgagttttctgacccaaccagcctctggttagcatcatttgtacatttaaacctgtaaatagttgttacaaagcaaagagattatttatttccatccaaagctcttttgaacanccccccccctttaatccctcgttcaggacgatgagcttgctttccttcaacctgtttgttttcttatttaagactatttattaatggttggaccaatgtactcacngctgttgcgtcgagcagtccttagtgaaa

SEQ ID NO: 719 - DNA, 181 bp, Homo sapiens
tgagggtttcagagagcctttttctaggcctacatgctttgtgaacaagtccctgtaattgttgtttgtatgtataattcaaagcaccaaaataagaaaagatgtagatttatttcatcatattatacagaccgaactgttgtataaatttatttactgctagtcttaagaactgctttct

SEQ ID NO: 720 - DNA, 464 bp, Homo sapiens
tccctgtaattgttgtttgtatgtataattcaaagcaccaaaataagaaaagatgtagatttatttcatcatattatacagaccgaactgttgtataaatttatttactgctagtcttaagaactgctttctttcgtttgtttgtttcaatattttccttctctctcaatttttggttgaataaactagattacattcagttggcctaaggtggttgtgctcggagggtttcttgtttcttttccattttgtttttggatgatatttattaaatagcttctaagagtccggcggcatctgtcttgtccctattcctgcagcctgtgctgagggtagcagtgtatgagctaccagcgtgcatgtcagcgaccctggcccgacaggccacgtcctgcaatcggcccggctgcctcttcgccctgtcgtgttctgtgttagtgatcactgcctttaatacagtctgt

SEQ ID NO: 721 - DNA, 426 bp, Homo sapiens
ttcgacttgcatttttgcaggagcagtatcatgaagcctaaacgcgatggatatatgtttttgaaggcagaaagcaaaattatgtttgccactttgcaaaggagctcactgtggtgtctgtgttccaaccactgaatctggaccccatctgtgaataagccattctgactcatatcccctatttaacagggtctctagtgctgtgaaaaaaaaaaaatgctgaacattgcatataacttatattgtaagaaatactgtacaatgactttattgcatctgggtagctgtaaggcatgaaggatgccaagaagtttaaggaatatgggagaaatagtgtggaaattaagaagaaactaggtctgatattcaaatggacaaactgccagttttgtttcctttcactggccacagttgtttgatgcatta

SEQ ID NO: 722 - DNA, 445 bp, Homo sapiens
agccggagccggatgcagtaggactggactcgggccatatccgtggtgccgtcaacatgcctttcatggacttcctgactgaggatggcttcgagaagggcccagaagagctccgtgctctgttccagaccaagaaggtggatctctcgcagcctctcattgccacgtgccgcaagggagtcaccgcctgccacgtggccttggctgcctacctctgcggcaagcctgatgtggccgtgtacgatggctcctggtccgagtggtttcgccgggcccccccagagagccgtgtgtcccagggaaagtctgagaaggcctgagccgtgacctcttctgcttactgtaactgcggccggtttagtgaccccatgacttacagccggttcttacctcttaggtgaaggagatgacatgttttttagaattgctgtgcaaggctcaccct

SEQ ID NO: 723 - DNA, 501 bp, Homo sapiens
gcagggctagttattccgatttcttgcacaattatttagctttttgtaagttcaacatgtaaattttaaagacataaatatagagagacttatgtgtttgaatataaatgatatatatggattagcatgtacctgtatattattaaacatgcaatgaactgactggtaagtgacgtctaattgtatggctagcaatgtaatttattcagactgtatttttgtacagagcagtgcactctaacctatgcctctgtgtcctctttaatgcctaaagctgtgcctagaaatttcatctgtcttaaaagtaaaatatacttcatgctgtttatgctattagtttctgtactgctattctatatttattatttttaaatatatgacatgtttactacttaaacatgaattcatggtatcctggttattttttttaagtcatctgggggaaaacctgtttatcactccagtgattttgagtttgcagtttcacaatcagttcttcat

SEQ ID NO: 724 - DNA, 477 bp, Homo sapiens
aaggagcttattcctggctccatcgctaacacgttgactgcttattatgggaaagttttctctgaagccagggagaagcattgattgatgtgggcaaatccaagctccagccaggtcgcagtcccaaatgccgacatcactgactccagggaccagggacatggagaaagctgtttatgatatctttaaccaggccctcttactagagctggtgtttgtgactggccaacaagatgtggctatgccaggggacatctgagtatgtgcccagtcatcttttttcacaggttgaagggagagaaaagattttgagttaaggtcattggctgctctactctgtcccctacctggtcacctagtgatagccccagtggagatactgtccatacaaggtcttcccagaggctggataccacagtaaaaggccaggccaggaggggtaggagactatggagatcttacctcctgataaatgtg

SEQ ID NO: 725 - DNA, 444 bp, Homo sapiens
atctattccatgtgtgatttgcttgtagaaacaattttgaaagccccttgaggaaaataaaaatcaagaagaacacttttctcccttttccatacaaattaaaacttaacagcatcaaattattgggaccagaaaccaagtaatgtataatgtggcttttgttgagttaaataagatgctatataatggagaagaatttgaaaatgcacaaaaaaatcaatctacattatcagaacctgcagtgaaattaaacttatgttaaataaaaccagtttgcaggtgcacaaactatgagggtcttgtatccacgtaacacaggtagttacaaaaacatgttattgtactgtgtaaagatgcatagtcatctcatttggttggctttgtaccttgtaccttttttagccttggcttttgttgaactagaaccctcagcacatactgtgt

SEQ ID NO: 726 - DNA, 475 bp, Homo sapiens
gagagctcgctttgagtgactgggttttgtgattgcctctgaagcctatgtatgccatggaggcactaacaaactctgaggtttccgaaatcagaagcgaaaaaatcagtgaataaaccatcatcttgccactaccccctcctgaagccacagcagggtttcaggttccaatcagaactgttggcaaggtgacatttccatgcataaatgcgatccacagaaggtcctggtggtatttgtaactttttgcaaggcatttttttatatatatttttgtgcacatttttttttacgtttctttagaaaacaaatgtatttcaaaatatatttatagtcgaacaattcatatatttgaagtggagccatatgaatgtcagtagtttatacttctctattatctcaaactactggcaatttgtaaagaaatatatatgatatataaatgtgattgcagcttttcaatgttagccacagt

SEQ ID NO: 727 - DNA, 317 bp, Homo sapiens
gattttctagtgctggtatttgttgactaccatgcagaagggctatctttctattcacgtcaaacttttggttgtgtggggttttttgttgttttttgggttttgttttttaatactttagggtcctgatttgtgggaacagaccttcttgtaaataaccactatttgagttgtggcaggaggatgataaagcacgcggcccctcccaaaggagcccttgagctagggaggtggtgcagtcagcctcgctctcaacgtgacccggggaatgaccacccagagggatgagctagcctgtagaggggaactggggtcca

SEQ ID NO: 728 - DNA, 496 bp, Homo sapiens
tctggttgcctatagtgctctgggatcccatcgagaagaaccatgggtggacccgaactccccggtgctcttggaggacccagtcctttgtgccttggcaaaaaagcacaagcgaaccccagccctgattgccctgcgctaccagctgcagcgtggggttgtggtcctggccaagagctacaatgagcagcgcatcagacagaacgtgcaggtgtttgaattccagttgacttcagaggagatgaaagccatagatggcctaaacagaaatgtgcgatatttgacccttgatatttttgctggcccccctaattatccattttctgatgaatattaacatggagggcattgcatgaggtctgccagaaggccctgcgtgtggatggtgacacagaggatggctctatgctggtgactggacacatcgcctctggttaaatctctcctgcttggcgacttcagtaagctacagctaagcccatcggccggaaaagaa

SEQ ID NO: 729 - DNA, 425 bp, Homo sapiens
gaagcacggtatgatgaccaaacataaaaagtgttttataattgttggtgttttaataacaactaatattattactctgatagttaaactaactcgagattctcagagtttatgcccctatgattggattggtttccaaaacaaatgctattatttctctaaagaagaaggagattggaattcaagtaaatacaactgttccactcaacatgccgacctaactataattgacaacatagaagaaacgaattttcttaggcggtataaatgcagttctgatcactggattggactgaagatggcaaaaaatcgaacaggacaatgggtagatggagctacatttaccaaatcgtttggcatgagagggagtgaaggatgtgcctacctcagcgatgatggtgcagcaacagctagatgttacaccg

SEQ ID NO: 730 - DNA, 400 bp, Homo sapiens
gaacacgcagagagtttccctagatatactcctgcctccaggtgctgggacacacctttgcaaaatgctgtgggaagcaggagctggggagctgtgttaagtcaaagtagaaaccctccagtgtttggtgttgtgtagagaataggacatagggtaaagaggccaagctgcctgtagttagtagagaagaatggatgtggttcttcttgtgtatttatttgtatcataaacacttggaacaacaaagaccataagcatcatttagcagttgtagccattttctagttaactcatgtaaacaagtaagagtaacataacagtattaccctttcactgttctcacaggacatgtacctaattatggtacttatttatgtagtcactgtatttctggattttt

SEQ ID NO: 731 - DNA, 459 bp, Homo sapiens
  misc_feature (32)..(32): n is a, c, g, or t
  misc_feature (78)..(78): n is a, c, g, or t
  misc_feature (82)..(82): n is a, c, g, or t
  misc_feature (242)..(242): n is a, c, g, or t
tcacaaacttttatactctttctgtatatacnttttttttctttaaaaaacaactatggatcagaatagccacatttngaanactttttgttatcagtcaatatttttagatagttagaacctggtcctaagcctaaaagtgggcttgattctgcagtaaatcttttacaactgcctcgacacacataaacctttttaaaaatagacactccccgaagtcttttgttcgcatggtcacacanctgatgcttagatgttccagtaatctaatatggccacagtagtcttgatgaccaaagtcctttttttccatctttagaaaactacatgggaacaaacagatcgaacagttttgaagctactgtgtgtgtgaatgaacactcttgctttattccagaatgctgtacatctattttggattgtatattgtgtttgtgtatttacgctttgattcatagt

SEQ ID NO: 732 - DNA, 528 bp, Homo sapiens
aacactagggccttggaaattcctgtactgtgtctcatggatttggcactagccaaagcgaggcacccttactggcttacctcctcatggcagcctactctccttgaggatgagtagccagggtaaggggtaaaggatagtaagcatagaaaccattagaaagtgggcttaatggagttcttgtggcctcagctcaatgcagttagctgaagaattgaaagtttttgtttggagacgtttataacagaaatggaagcagagttttcattaatccttttacctttttttttttcttggtaatcccctaaaataacagtatgtgggatattgaatgttaaagggatattttttctattatttttataattgtacaaaattaagcaaatgttaaaagttttatatgctttattaatgttttcaaaaggtattatacatgtgatacattttttaagcttcagttgcttgtcttctggtactttctgttatgggcttttggggagccagaagccaatctacaatctctttttg

SEQ ID NO: 733 - DNA, 570 bp, Homo sapiens
  misc_feature (233)..(233): n is a, c, g, or t
  misc_feature (252)..(252): n is a, c, g, or t
  misc_feature (259)..(259): n is a, c, g, or t
  misc_feature (347)..(347): n is a, c, g, or t
ggatttttaggtcagcccaggggagaaagataactgctaaaattcccctgtaccccatcctttcttgtcctttccccttcagatggagacttcattatgttaatgaacaagatatgaagaaaatggcactcattgtggccttgttgaattatgttgtgtatgttttaacatctctgatgctgtgttactaaaattacaaggacctgctttttaaaaggccagaacaattgtcntgaaattagtaacaatgcntgcatcntagattggagtgctgcacaaacaaacataagagcaaagcaaaactgtatcacatagggtttttggtcactcacaacctgaattcaccnacagctggaatagctgtggaaaacaaaataaaacaacaaaattaataatgaaatggaggggaattctagaattatatgctaaatgcatattttatgatttgctgtattaactgatgataaaactaatggcagaaaaagaagttgagcaatttctatgtaatgtacagatactagcattgcacatatagtctgctttctgttcctccagaatttgagtcctgtt

SEQ ID NO: 734 - DNA, 246 bp, Homo sapiens
agttcaagtacagtgactatttcaagccattttccacaggaaaacgagtgtgtgctggagaaggcctggctcgcatggagttgtttcttttgttgtgtgccattttgcagcattttaatttgaagcctctcgttgacccaaaggatatcgacctcagccctatacatattgggtttggctgtatcccaccacgttacaaactctgtgtcattccccgctcatgagtgtgtggaggacaccctgaac

SEQ ID NO: 735 - DNA, 358 bp, Homo sapiens
ccgggggcctatggcagtgatgctgtgttggtttcctagggatgctctaacgaattaccacaaacctggtggattgaaacagcagaacttgattcccttacagttctggaggctggaaatctgggatggaggtgttggcagggctgtggtccctttgaaggctctggggaagaatccttccttggctctttttagcttgtggcggcagtgggcagtccgtggcattccccagcttattgctgcatcactccagtctctgtctcttctgttctctcctcttttaacaacagtcattggatttagggcccaccctaatcctgtgtgatcttatcttgatccttattaattaaacctgcaa

SEQ ID NO: 736 - DNA, 454 bp, Homo sapiens
gtagctctgatgagaatggggtcccagatggctcaggctgtgacctccctgggcaccaccctccccaggctgggtgtggaggagttggggccccctgccttcaggaggcttgtagtttagaagggaagtaggcattaccatagacgactcctagaggacagtgctatgtaaaaatgtgtgtctataaatgtttatcatgcatgtattctagagctcattcatttattcaacaaacatttggtgagcacctatttcggttcgagaaacttcatttatctcctataattggcaaacttaaaaatgcagcagaaacttacattccaaccttagagactcatagtgagcacaaggaaagttttgccctgagattcatggttatggctgggtaccaccaaatagaagaatggcttaggggagtgccccttcactgagatgtgtttctttgttgaacttt

SEQ ID NO: 737 - DNA, 226 bp, Homo sapiens
aacgaactgaactaggcctggtggaaggaggcgcactttcctcctggcagaatgctagctctgagccagttcagtacctggaggaggagcaggggcgtggagggcgtggagggcgtgggagcgtgggaggcgggagtggagtggaagaagagggagagatggagcaaagtgagggccgagtgagagcgtgctccagcctggctcccacaggcagctttaaccatta

SEQ ID NO: 738 - DNA, 560 bp, Homo sapiens
tctactgcgtgacttgccatgagaccaagtttgccaagcattgcgtgaagtgcaacaaggccatcacatctggaggaatcacttaccaggatcagccctggcatgccgattgctttgtgtgtgttacctgctctaagaagctggctgggcagcgtttcaccgctgtggaggaccagtattactgcgtggattgctacaagaactttgtggccaagaagtgtgctggatgcaagaaccccatcactgggaaaaggactgtgtcaagagtgagccgcccagtctctaaagctaggaagcccccagtgtgccacgggaaacgcttgcctctcaccctgtttcccagcgccaacctccggggcaggcatccgggtggagagaggacttgtccctcgtgggtggtggttctttatagaaaaaatcgaagcttagcagctcctcgtggcccgggtttggtaaaggctccagtgtggtggcctatgaaggacaatcctggcacgactactgcttccactgcaaaaaatgctccgtgaatctggccaacaagcgctttgttttccacc

SEQ ID NO: 739 - DNA, 440 bp, Homo sapiens
cccattcggcgtagtacccagagagctcaagatgtgtggcagttttcggatggaagctcgagagcccttaagttctgagaaaatttgaagcccccaggggtggggtggacgcgtgccgcccagtcgacgtcagcgtggtctgtcatcctgctagtttgtgatgttttctgacagtagcctccaagaagccgttgtgcgaagacagagtcctgcagagtccttccagcctaggcctgcagcgccattttatttatattttttaataaaaagtaaaaacaaaaaaacagacccacattggaacagtgaatcagtcccatagagagggcccgtggaccatcgctgtcatgagtgatgccctggcccttctgaaaccagccaacctaattacctgtattgtggaaatgcgcatgagtccccaaccccttgtttctatacattct

SEQ ID NO: 740 - DNA, 473 bp, Homo sapiens
tggaggcgcaggcacaaggtttgttggagactgaaccgttgcaaggaacagacgaagatgcagtagccagtgctgacttctctagcatgctctctgaggaggaaaaggaagagttaaaagcagagttagttcagctagaagacgaaattacaacactacgacaagttttgtcagcgaaagaaaggcatctagttgagataaaacaaaaactcggcatgaacctgatgaatgaattaaaacagaacttcagcaaaagctggcatgacatgcagactaccactgcctacaagaaaacacatgaaaccctgagtcacgcagggcaaaaggcaactgcagctttcagcaacgttggaacggccatcagcaagaagttcggagacatgagacgaaagtaggcggtacgaaccctaatggaggcagttttgaggaggtcctcagctccacggcccatgccagtgcccagagcttggcag

SEQ ID NO: 741 - DNA, 255 bp, Homo sapiens
gttcctgaaatcctgagtgttgcctgccagtcgccatgagaacttcctaccttctgctgtttactctctgcttacttttgtctgagatggcctcaggtggtaactttctcacaggccttggccacagatctgatcattacaattgcgtcagcagtggagggcaatgtctctattctgcctgcccgatctttaccaaaattcaaggcacctgttacagagggaaggccaagtgctgcaagtgagctgggagtgacc

SEQ ID NO: 742 - DNA, 566 bp, Homo sapiens
ggtgattggccacacactgagttgcacatattgagaacctaatgcactctgggtctggccagggcttcctcaaatacatgcacagtcatacaagtcatggtcacagtaaagagtacactcagccactgtcacaggcatattccctgcacacacatgcatacttacagactggaatagtggcataaggagttagaaccacagcagacaccattcattcctgctccatatgcatctacttggcaaggtcatagacaattcctccagagacactgagccagtctttgaactgcagcaatcacaaaggctgacattcactgagtgcctactctttgccaatccccgtgctaagcgttttatgtggacttattcattcctcacaatgaggctatgaggaaactgagtcactcacattgagagtaagcacgttgcccaaggttgcacagcaagaaaagggagaagttgagattcaaacccaggctgtctagctccgggggtacagcccttgcactcctactgagtttgtggtaaccagccctgcacgacccctgaatctgctgagaggcacc

SEQ ID NO: 743 - DNA, 555 bp, Homo sapiens
gcattccaccggcggctacggtggtggcaattccggcggcggcggcggcggcctacgggggcggcactccggcggcggcagcagctccggcggcggatacggcggcggcagctccagcggaggccacaagtcctcctcttccgggtccgtgggcgagtcttcatctaagggaccaagatactaacaaaaccagagtaatcaagacaattattgaagaggtggcgcccgacggtagagttctttcatctatggttgaatcagaaaccaagaaacactactattaaactgcatcaagaggagagagtctcccttcacacagaccattaatttacagatgcatggaaaacaaagtctccaagaaaacacttctgtcttgatggtctatggaaatagaccttgaaaataaggtgtctacaaggtgttttgtggtttctgtatttcttcttttcactttaccagaaagtgttctttaatggaaagaaaaacaactttctgttctcatttactaatgaatttcaataaactttcttactgatgcaaacgtctgagattact

SEQ ID NO: 744 - DNA, 436 bp, Homo sapiens
ttcgtgatggtgttgatcctcttcctgggagcctccatggtctacctgatccgggtggcacggaggaaccaggagcgtgccctgcgcaccgtctggagctccggacatgacaaggagcagctggtgaagaacacatatgtcctgtgaccgccctgtcgccaagaggactggggaagggaggggagactatgtgtgagctttttttaaatagcgggattgactcggatttgagtgatcattagggctgaggtgtgtttctctgggaggtaggacggctgcttcctggtctggcagggatgggtttgctttggaaatcctctaggaggctcctcctcgcatggcctgcagtctggcagcagccccgagttgtttcctcgctgatcgatttctttcctccaggtagagttttctttgcttatgttgaattccattgcct

SEQ ID NO: 745 - DNA, 505 bp, Homo sapiens
ggctccatgaaggtcctttggcacagctctgctcctcccctgcctgccaaagcccccctttaggccttgggtggctggaaggctttgttaagggactaggagaaatgggggtatctttcccctttcctgccctttctgctcatctcaacctctcacagaggtgtcttctccccctaacctacagctttttgtacaagccattttgtgtaaattatttatatttaatattattccctgctttgtcaggagcaggtactaggctctggggcagtgaggaactagatccttctctcctcagcctagggtggaggtcactgcactaccacccacctctggaagactggctgtgaaaagtcaggtggcagaaacctggggccacatagagcctctctcttttcctgtttcttggctctagaagatcagcactgcactgttagctgagagtgcgggcaagacataaactgtccagagtttgaaggttctcggaaagaccggagggcttctc

SEQ ID NO: 746 - DNA, 471 bp, Homo sapiens
gagggccgaacccacatgacaaagagtgactccctgccctccttccgggtctccaccctgcctctggagtcacaccaccccgacccaaacaccatgggcggggccagccaccgggacagggctctctcggtgactgccaccgtaggggaaaccaaagggaaggaccctgccccagcccagcctcccccagctaggaaacagaacgtgggcagagacgtgaccaagccatccccagccccaaacactgaccgccccatctctctttctaatgagaaggactttgtggtacggcggaggcgggggaaagagagtttgcgtagcagccctcacaaaaaggccttgtaacggggagggcccaggggcaggactgtggagacccgtcctgaacgggcgactgtgtcttgactacctttcaaaaccagcactgtgtgggaatgtccgccaggcagagctcggagcctcattgagaca

SEQ ID NO: 747 - DNA, 256 bp, Homo sapiens
cgctaggtgcctgctaggtgcatggccacagagcatgggctgggcctgggcacaggaggagcagctgctttggtcggggtggagactcgcagcagctgctacccacagcctattccactcctccccatctccaggcgctgggaggggggccctcaccccgtcacgcctcgctccctcctggccctctggtccagcccctcacgcctcctctcagtctactcaattgtgactgtccctcctgatgtattttttttct

SEQ ID NO: 748 - DNA, 528 bp, Homo sapiens
agccctgcgttgtgtgttttcagatgagttactgttaacaggtaggttcgtgtaggccttgctgggcactctgtacaattagttgcttattacgtatgattactcgcagcgatctattgttccatataaccaaaaagcatggtttattcattgaaacacggttgacctgaactcgtgccttaggaattaatgcccccttatggaacctgcctgaattgcacctgcgggtggaggctccggctgtgaagtcactgaacagaacgtcgctgatggagaaagggctcccgcagaaggaacggcctgtaccgtgcgctccggcacaatcgcgtctcttgtgtctcactcacggaaagaaacaacctgaaggccatcccgtcggtctgcacgtaaccgtgaagacgtgtggccgcgtcccacctgcggctgggtaccctgcacccggcactgtaggagtcacgtgcagcctttctcaggggactgtcattgaaaaggaaacgtttgatgtctgtgtcagctgtctttgtagtt

SEQ ID NO: 749 - DNA, 518 bp, Homo sapiens
agatgtgcgcaggagtacctgtcccgggtgaagaaggaggagcagaggtaccaggccctgaaggtgcacgcggaggagaaactggacagggccaatgctgagattgctcaggttcgaggcaaggcccagcaggagcaagccgcccaccaggccagcctgcggaaggagcagctgcgagtggacgccctggaaaggacgctggagcagaagaataaagaaatagaagaactcaccaagatttgtgacgaactgattgccaaaatggggaaaagctaactctgaaccgaatgttttggacttaactgttgcgtgcaatatgaccgtcggcacactgctgttcctccagttccatggacaggttctgttttcactttttcgtatgcactactgtatttcctttctaaataaaattgatttgattgtatgcagtactaaggagactatcagaatttcttgctattggtttgcattttcctagtataattcatagcaagttgacctcagagttcctgtatcag

SEQ ID NO: 750 - DNA, 545 bp, Homo sapiens
aaatagcattaaactggaattgacagagtgagttgagcatctctgtctaacctgctctttctctctggtgctcctcatctcacccctaccttggaatttaataagcttcaggcatttccaattgcagactaaaaccacttctaccatctcctctagtattttccatgtatcaggacagagatgtcttatgtagggaaggggcaggtatgaagtgaggtagattatctatacctctcactcattcaggattctcgctcccatgctgctgtcccttcattctcacactcacaggaatgctatgtgatggccagctgcttcccttcttggttatccactgcagctgctagttagaaaggtttgcagggatgacttttagtaaatcatggggattttattgatttattatcacttataggattttgtggggtgggagtggggagcaggaattgcactcagacatgacatttcaattcatctctgcaaatgaaaagggttcttcctcttgggggaaatctgtgtgtcagttctgtcagctgcaagttctt

SEQ ID NO: 751 - DNA, 421 bp, Homo sapiens
gagtattacattggccttgggggacagaaaggaggaagttctgacttttcagggctaccttatttctactaaggacccagagcaggcctgtccatgccattccttcgcacagatgaaactgagctgggactggaaaggacagcccttgacctgggttctgggtataatttgcacttttgagactggtagctaaccatcttatgagtgccaatgtgtcatttagtaaaacttaaatagaaacaaggtccttcaaatgttcctttggccaaaagctgaagggagttactgagaaaatagttaacaattactgtcaggtgtcatcactgttcaaaaggtaagcacatttagaattttgttcttgacagttaactgactaatcttacttccacaaaatatgtgaatttgctgcttctgagaggca

SEQ ID NO: 752 - DNA, 375 bp, Homo sapiens
aagctatgtgtatcttctgtgtaaagcagtggcttcactggaaaaatggtgtggctagcatttccctttgagtcatgatgacagatggtgtgaaaaccatctaagtttgcttttgaccatcacctcccagtagcaatttgctttcataatccatttagcaatccaggcctctgttgaaaagataatatgagggagaagggaacacatttccttctgaacttacttccctaagtcactttccttatgtatcatctaatacaatgatggttgagtgaaaatacagaaggggtgtttgagtattcagatttcataaaacacttccttggaatatagctgcattaacttggaaagaagcctgttgggccagaagacaga

SEQ ID NO: 753 - DNA, 532 bp, Homo sapiens
caggattggccaagtccatcggggtgtccaacttcaaccacaggctgctggagatgatcctcaacaagccagggctcaagtacaagcctgtctgcaaccaggtggaatgtcatccttacttcaaccagagaaaactgctggatttctgcaagtcaaaagacattgttctggttgcctatagtgctctgggatcccatcgagaagaaccatgggtggacccgaactccccggtgctcttggaggacccagtcctttgtgccttggcaaaaaagcacaagcgaaccccagccctgattgccctgcgctaccagctgcagcgtggggttgtggtcctggccaagagctacaatgagcagcgcatcagacagaacgtgcaggtgtttgaattccagttgacttcagaggagatgaaagccatagatggcctaaacagaaatgtgcgatatttgacccttgatatttttgctggcccccctaattatccattttctgatgaatattaacatagagggtgttgcacgacatctagcag

SEQ ID NO: 754 - DNA, 159 bp, Homo sapiens
tcactgagcaccacattctctagcttcttgttgaggctggaactgtttctttaaaatcccttaattttcccatctcaaaattatatctgtacctgggtcatccagctccttcttgggtgtggggaaatgagttttctttgatagtttctgcctcactca

SEQ ID NO: 755 - DNA, 378 bp, Homo sapiens
acatctccattacaaatgccacagttgaagacagtggaacctactactgtacgggcaaagtgtggcagctggactatgagtctgagcccctcaacattactgtaataaaagctccgcgtgagaagtactggctacaattttttatcccattgttggtggtgattctgtttgctgtggacacaggattatttatctcaactcagcagcaggtcacatttctcttgaagattaagagaaccaggaaaggcttcagacttctgaacccacatcctaagccaaaccccaaaaacaactgatataattactcaagaaatatttgcaacattagtttttttccagcatcagcaattgctactcaattgtcaaacacagcttgca

SEQ ID NO: 756 - DNA, 436 bp, Homo sapiens
agtgagaagatctgcaccgtccagttggtgggtaacagctggacccctggctaccccgagacccaggaggcgctctgcccgcaggtgacatggtcctgggaccagttgcccagcagagctcttggccccgctgctgcgcccacactctcgccagagtccccagccggctcgccagccatgatgctgcagccgggcccgcagctctacgacgtgatggacgcggtcccagcgcggcgctggaaggagttcgtgcgcacgctggggctgcgcgaggcagagatcgaagccgtggaggtggagatcggccgcttccgagaccagcagtacgagatgctcaagcgctggcgccagcagcagcccgcgggcctcggagccgtttacgcggccctggagcgcatggggctggacggctgcgtggaagacttgcgcagccgcc

SEQ ID NO: 757 - DNA, 441 bp, Homo sapiens
gagagctcctgtttactaagcaagcttttgtgtttattatcctcatttttactgaacattgttagttttggggtaatggaaacccactttttcattgtaatgactttgggggcttttgttagtaagggtgggtggggtgatgggttgcagacggaggtcaggtcttcctctttcctgagactggatctgttcaaacagcaaacgcccacagatggcccagaggtggtggtagtcagggtgtgtgggtgtttttagggttctttagtgttgtttctttcacccaggggtggtggtcccagccagtttggtgctgacggtgagaggaaattagaatctgtttgcaaattgtccaacccaccccctcaacatgaggggcttccattttctgtgttttgtaagggaactgtttccttcatgccgccatgttcctgatattagttc

SEQ ID NO: 758 - DNA, 437 bp, Homo sapiens
ttctacctgaacacttgtactcttgaagtcacaacaaaataatgatgagcttttcacatcacctttatggtttcaatccctagctcaaagcttcctggaatcttttattttttgtaaacttttttttcttttgttaaaataaataaaacattcaatgtttttctccttttctctcttattacttctttcctttggcattttcaatttgaaatgctttcctttggttgttggttttattctccccctacccctccccttttcttattattcagaatataaacctgcaaagctctgctctgttttggttttgaaagtttaagcttttctgcttctgtgagagcacaggcttctgtcccttttgattccaactgaacttttgtgttctctaatgatactaacacggtgtaggttttacagtctcctaatttgtactggta

SEQ ID NO: 759 - DNA, 402 bp, Homo sapiens
cttaactcttttgacatctgctattgtgacacatcccattgctggcaatgtggtgcacactccgaaacttttaactactgttttgtaagcctccaagggtggcattgcagggtccttaggcaatgttttgtttgcctttatgcagagaggtgctccaagtgctgtgattgagcaccgtgctagaggaactgtaatgcttcagaagttgtagcttatacaaaggaaacaggtcctgctggcttaatttaaacagttattgcatgaagtagcgtggaggccctggactgctgctcgttctttaggatggactgttctggtatctggtattggtttagagactgttaataagggacatcacaaggtgatgggattcatttgaagcactctatttctgttttaatg

SEQ ID NO: 760 - DNA, 501 bp, Homo sapiens
cagaaaaggcataccacgagcagctgtcggtggcagagatcaccaatgcctgctttgagcctgccaaccagatggtaaagtgtgatccccggcacggcaagtacatggcctgctgcctgctgtaccgtggagatgtggtgcccaaggatgtcaacgctgccattgccgccatcaagaccaagcgcagcattcagtttgtggactggtgccccacaggcttcaaggttggtatcaactaccagcctcccactgtggtgcctgggggtgacctggccaaggtgcagcgtgccgtgtgcatgctgagcaacacgaccgccatcgccgaggcctgggcccgcctggaccacaagttcgacctgatgtatgccaagagggcgtttgtgcactggtatgtgggtgagggcatggaggagggtgagttctccgaggcccgtgaggatatggctgccctggagaaggattatgaggaggtgggcatcgactcctatgaggacgaggatg

SEQ ID NO: 761 - DNA, 441 bp, Homo sapiens
  misc_feature (35)..(35): n is a, c, g, or t
tgttacatggcagcttaggcagactagatcttgtnttttccaatgcagcataatgagtatgatctatttcttttcaaataatctttgagatcccaggaaaaaaaaaatgctctgctccattgagctataatgtaaatgtgtttgtttaaaaaacaggtgaggcaagtgagtgatttattgttcctgaggaagtatatctgattttttttctcatactccaaaagctagtccctactctttaataaaaataatgggtaactttttgtttttcactagcgaacttccatgacatttcctttctatgtagtgtgattaatgcaatacatattatagttatctatacacagtgtaagatttaacaaactgaaatgatccacctcatatgtgagtccgtccaaaagatgttactgctctgggtgggccagtgttctatatcggtta

SEQ ID NO: 762 - DNA, 521 bp, Homo sapiens
  misc_feature (82)..(82): n is a, c, g, or t
  misc_feature (89)..(89): n is a, c, g, or t
ctgtgcgacgagtttcagctggccaagaaaggagtcaagttattaaaaagcatcacaatgtagatctccaggctggtttttngtttttngttgttaagactggggaaagggggactatttattctgccttaaatcaatggcaaataagtcaagatgacattttgtgaatgtagactatggatacactcctaatagattgatgtagtcataaaagggggtcaagtagatgtttttctgttatgtaagcaataatttttccgtgtcttattgagtatggctagcgattatttattacatgctagatgggttctttgcatgtgggttccatataggtgcagaaatttcctcagccactggagggatttcgaccatatttgtcatttggatgagctgttattagattgaaatctacacatcatttcattaaaaattgtgccttagaaaacgcaaagctgttgcacatggcgataaattatggatgcagtacattgaagagagatgaagtcacttccaagtttcca

SEQ ID NO: 763 - DNA, 462 bp, Homo sapiens
  misc_feature (64)..(65): n is a, c, g, or t
  misc_feature (115)..(115): n is a, c, g, or t
  misc_feature (121)..(121): n is a, c, g, or t
  misc_feature (422)..(422): n is a, c, g, or t
  misc_feature (432)..(432): n is a, c, g, or t
gggggctcagtgagcactactcacagatccacacctgaccctgttgggtcgagtcaggctgggnnttggtctgcactgtagcacctgtgttctttgagttcacatcatgaatgtnggtganttcccagataccatctcaggcttaacctagcacatcctatttcttttcttctatgatatccaaattggactgacctcacttcaaagttgctgtcccattttgtcaccctatcttatctcggggaaattgcagactgatggccagaccaactctgttgaaattcttgcatagagcaaacctgtgctcatttttaagtggcatgggagaggccccaagcctagtaaagcctagtctgtgtcttcacagtgctggtagaatgtgtttgtgtgtataaatatatgatatagatttatatatgttnctaacgccanatattgaaggccaacataactggtggacag

SEQ ID NO: 764 - DNA, 495 bp, Homo sapiens
gtgaaccaggagatttagtgcttttatattcatttccttgcatttaagaaaatatgaaagcttaaggaattatgtgagcttaaaactagtcaagcagtttagaaccaaaggcctatattaataaccgcaactatgctgaaaagtacaaagtagtacagtatattgttatgtacatatcattgttaatacagtcctggcattctgtacatatatgtattacatttctacatttttaatactcacatgggcttatgcattaagtttaattgtgataaatttgtgctgttccagtatatgcaatacactttaatgttttattcttgtacataaaaatgtgcaatatggagatgtatacagtctttactatattaggtttataaacagttttaagaatttcatccttttgccaaaatggtggagtatgtaattggtaaatcataaatcctgtggtgaatggtggtgtactttaaagctgtcaccatgttatattttctt

SEQ ID NO: 765 - DNA, 458 bp, Homo sapiens
  misc_feature (82)..(82): n is a, c, g, or t
gcaatcttggaatcctcaactgcagtaagcatttcaaaatgcaaacaaactgcttaacaactgacaagacaccagcccatangctgctcttccaacagtgggttctagctttgaacaaaagtgctaaacatttccttgaatatattcttcctctttttgtcctcatcactcaatactggtgctcttgtcacaggtagaacagcttgtttcttttccatctattcaagtgtgtttctaattctaaaatgctgatcttctctggagtctatggtaggcaattatggtcactggaatagtttgtcttgttttaaaatattattggtgcatgtacaacagcatccaacatatctgtcttgttcctagatatatagctctgattttaggccttttgtgcataccattacaatatggtggggtaagacattctacagtagcctgtgctgaactgatctcttaaa

SEQ ID NO: 766 - DNA, 414 bp, Homo sapiens
aattctcactgttcacttttaactgacaaagaaaaacaagtggaaactacagaaactgtggtagaacttttacttgctggtctggtcttggttgtacccatctttggccagtcacataactactcaagaaaccttcccaatagagtacaacaggatgagactctgaaatcactttcagtattccctgctagatattgattgttatttcaagtattaagtgtaagcttttaatggataattagtataactgtggatggcatctgattttgtttttaattctgtggattgtgtttaagcaattcaatagtatgttcctgattttgagatgctaagtggtattgcacagttgtcactttatcaagtgtgtacaacagtcccatgaagtttatagagcatacccttgtatagcttcag

SEQ ID NO: 767 - DNA, 441 bp, Homo sapiens
tttcgagggggcaaggagggacagaaaagtaacctcttcttaagtggaatattctaataagctaccttttgtaagtgccatgtttattatctaatcattccaagttttgcattgatgtctgactgccactcctttctttcaaggacagtgttttttgtagtaaaatcactggtttatacaaagctttatttagggggtaaagttaagctgctaaaaccccatgttggctgctgctgttgagatactgtgctttgggagtaaaaaaagaaagttatttctttgtcttaaagaatttttaaaaaattagtcatgagacttattcatctttccagggaacatactgattggtcttaaaagactagacagttaagtaaaaggtggctggaacatctatttttctacaaaactggaaaaatgaacctggttctagaagaatgtaca

SEQ ID NO: 768 - DNA, 529 bp, Homo sapiens
gcagccaaggtctgtgttcagcacttggtctctgttgttacgtaaaataataagcatttaaaatagtttacagatatttttgaccagttccttttagagattctttcagagaagaaaccagatctgacctgtttattgttggcgcttgttgaaaacgagctttctttcccatgatagtgcttcgtttttgaagtgttgaagctgtgctccccttaaatcgtggcaggagagattaaggtaattacaacactcagttctatgtcttacaagcactttgtcttgtctctgcaagaaaattcgattccagtcatttcccataaaatacagacattttaccaacataatatgctttgattgatgcagcattatgctttgggcagtattacaaaatagctggcgagtgctttctgtatttaaatattgtaaaaagaaaataagttataactgttataaagcagaacttttgttgcattttttaaactgttgaagtcactgtgtatgtttgtttggtcaatgtttccgcagtatt

SEQ ID NO: 769 - DNA, 474 bp, Homo sapiens
gaactcatgtgatttacccttttcaactttttggaaaacgatttaatttattctaattagattaaccctattaatctatggattgggtatcaaaatgaatgccagtccagatgtgcctagacacgaaattggagctgaggactctcacgatatgcaagttcatccaacgtgaagataccataagctttttctctgaaccagagaaatgaaagtcagtttaagaggctgatagatcttggccctgttaaggcatccacttcacagttctgaaggctgagtcagccccactccacagttaggccaagaattagattttaaaacttcatctgtctgtcccagttaactgttaaataaggcctcatcctccactgaagagtatggattgaaggattgtgaactatgtttagtgtgattgtgaacttggtgcctaatgttccatgtctgaagtttgccccagtgctacacgttggagta

SEQ ID NO: 770 - DNA, 536 bp, Homo sapiens
ccctcaagcctgggctcatggagcccctgcccagggccctcaggtgggcggaaagtccatcccctccgcccttcaggaaggatgctcccgtgtgcaggggtctcctgcctgtgccatccactggggctcgagacaatttcccactcacctgtgaggccggtgtggctgcttcccttgtaaatagttgttctctggtaagaagccaaatatttaagctcacttcttcccagagagaggaagctctgctcaggcctccagcgttggctggccatggccacagccagatggaggagcccatccccaggagactcaggcagtggcctggagaggctttgttctgtaacggtgccttttcttagggtccaggcaggaatgaagccaataatttattgctttccattctgtggtatgatgtgcgtgtgcgtgagtgtgtggcccctgtttattcccctcctgtcaagaatgaagtggattcagttcaggtacttttgagggttgttgtgctgaccctgtggttgtcgctgatgtacacacat

SEQ ID NO: 771 - DNA, 549 bp, Homo sapiens
  misc_feature (225)..(225): n is a, c, g, or t
ggatgggctggaccaggtgggacagattagctgatgcccttgtcacctgccctctgtgcaccctgagagctcacagtaacactgtgtgtgtcaccatataactgcacctcacccccgcacgtgtgcatgactcgcagagaatattccagcaattgtgtacccctgggccagtctctttgaaccctgagggtggccaggatctggagctgcatctctaaggggccnaggctttggggaccattgccaaaggtggactcaggaggaaagacacttaaagacacttttacatgtctagtaattcttgatgttcatcttcagcaccagtggaaacacatgaacttcgatgcaggtccagagaccatggacactcccacgaggctcagctctcaggcaccccctacacttcagttgagggaaaagctcaagtgccttaggcccgtggaccacagtcttggctgagatcaaagggatgagcaacagggacttctgccacagtgacaatggaattgtgttgtgccttacttcagaggtggtctcttctttcttgta

SEQ ID NO: 772 - DNA, 443 bp, Homo sapiens
ttcctgagttgaaacttctcctgtggttactggtattgagaaatcagctaccaaagtgaaaaaggacaagatcaattcttttctagtcagttctaagactgctagagagagataccaggcccttagccttgctctcagtagcgtcagccccagttctgagcctccccacattacacttaacaagcagtaaaggagtgagcactttgggtccttagactcatgtctggggaggaagagcaagtagaaaagtggcattttcttgattggaaagggggaaggatcttattgcacttgggctgttcagaatgtagaaaggacatatttgaggaagtatctatttgagcactgatttactctgtaaaaagcaaaatctctctgtcctaaactaatggaagcgattctcccatgctcatgtgtaatggttttaacgttactcactggag

SEQ ID NO: 773 - DNA, 475 bp, Homo sapiens
  misc_feature (192)..(192): n is a, c, g, or t
  misc_feature (195)..(195): n is a, c, g, or t
  misc_feature (222)..(222): n is a, c, g, or t
  misc_feature (351)..(351): n is a, c, g, or t
taatctcacggctcttgatctggaaacttcagagtacaaattggtggatggtggaaggcaggacacgtatctctgtctgacggaaaacagacctcggggctggcgtaaaccctgctgccaggccctctccccactgccccaaaccggcctagacacgaagaccaaagcagcctgcacagggcaaggcccccngcngaatcctgcagagcaaactcaggttancttgggtccatgaccgtttgcattcgaaacacaatacactgcctcgttctctcagttagcagctgggcagcagcgcaccattcatcatttaggcttgtggtttgttgtttactctaccaatgttatgtngaaactgcattgtaaaaagagaagaaaatggcaggttttccaggtccacggaaaggtttggcctgacgctggagtgcggtgatgaacttacgtgacaatgattgtattcctcagtagcacttta

SEQ ID NO: 774 - DNA, 504 bp, Homo sapiens
gaattcacacggtactcagaggcactgctggggaagtttgttggtctttattagataaatttccagagacctgtccataatacccaacagaacatgactgtttctttgaggaaagggttataatgtctgtggtgtacaagtcgtttttggtataacttctttcctgctgctgctgcttcccggcaaacatagttttcctatttcaggcagagtgcggtatattccaggaaacactgtttcctactcacttagcttacttctttgttgaatgcctcactaatggcaagtttcaagatgttttgggtgacaatgcacacatgctgggcaaaagggtgatggccagtggctggcagctgggccagcagaagctaggacatctgtgagttgtcattctcatctatccatgtccactggcctgccagcatccgccagtgccttgccagtgtgcacggtcccacactgtggcccctgagtcccctaatgtacacgctgcagccagaatgc

SEQ ID NO: 775 - DNA, 417 bp, Homo sapiens
gacgagtagtcagttattgcttgctagctacacaccagggttgatccattttaaaacttttggcattttgtcctcatgggccataaatacagaaccttgtattttaattaaatttttttacaaaaggaggcacatgcacaatctccatgtaacaaacctttagcagtaggatgtattatacgacagttacttaatttctagagttcaggcctctgggatcaaccccagactgggccagaatgttagtgaaggttttattgtgcccggttggaggataacgttctttgggtactttttgtgggttgcaaatgaactcaattgccacaagttttaaactggtgtaaatcaagcttgacttaatgtgattgttactgttatatccagcctatactgctagcagctgctcatactgcagtc

SEQ ID NO: 776 - DNA, 304 bp, Homo sapiens
  misc_feature (238)..(238): n is a, c, g, or t
aaaagcgcttcagtgccactagcttaccggtacactagactaagcccttgatgacttattgcatgatacagtaccaggaacaacaggtggcctaaatacatgaaaagcagtgtaagctagtgacactaaagccagtcttgtattactgtatttttgacagaatggttttgaaaactgtgctacagggactgatgtggcaaatatatctctttatgcagaaggaagtctttttttttcntttttttttttttaagaagtatggctttttatgcatccttcatcgagggcattgaagttgcatgga

SEQ ID NO: 777 - DNA, 554 bp, Homo sapiens
  misc_feature (163)..(163): n is a, c, g, or t
gccattccccaggctatgaagtgacataggcctcccccacggtgcctgtgtacggagcctgatgacttcactgggagccttctggaatcctgcagagggtcaaggagcagggatgttggatgcccacctgtcaagagttcagatcaaagttgcgctgagagcntcacaattttggttcagccttgacgcgtttgtccaacagctcattggctccctttgtatgatatcgtggtcttctcacatggtgcccagtcaccaatatttataatgaggtctaactacagcagtagtttttcatatatatctctaaaacattttgttatattgaaaaaagtaatagaaatcaagatgtgttgatgaaataaaatgtgtatctgagtgagaaaacaagtatggtgaggtcactttaatgtttcacagcgatctcagatctaggcctcaggtagaatggaagctgttctgcattcactgattaacgttgctaaactcttggtgaggcacgagctaccagccaattgctcttcatcacagctatctgtcttttagtgccacaa

SEQ ID NO: 778 - DNA, 147 bp, Homo sapiens
gacaggagggtgtccacatatgttaacatcagttggatctcctatagaagtttctgctgctctctttccttctccctgagctggtaactgcaatgccaacttcctgggcctttctgactagtatcacacttctaataaaatccacaa

SEQ ID NO: 779 - DNA, 560 bp, Homo sapiens
  misc_feature (175)..(177): n is a, c, g, or t
  misc_feature (179)..(181): n is a, c, g, or t
  misc_feature (190)..(190): n is a, c, g, or t
  misc_feature (422)..(422): n is a, c, g, or t
  misc_feature (426)..(426): n is a, c, g, or t
  misc_feature (429)..(430): n is a, c, g, or t
gctccacatgagccatgcatgcttagcaatccaagtgcagagctctttgctccaggagtgaggagactgggaggtgaaatggggaaatggaagggtttggaggcagagctgaaaacagggttggaaggatttcctgaattagaagacaaacgttagcatacccagtaaggaaaannngnnnaggggccanggggaacccgtgaggatcactctcaaatgagattaaaaacaaggaagcagagaatggtcagagaatgggattcagattgggaacttgtggggatgagagtgaccaggttgaactgggaagtggaaaaaggagtttgagtcactggcacctagaagcctgcccacgattcctaggaaggctggcagacaccctggaaccctggggagctactggcaaactctcctggattggncctnatnnttttggtgggaaaggctgccctggggatcaactttccttctgtgtgtggctcaggagttcttctgcagagatggcgctatctttcctcctcctgtgatgtcctgctcccaaccatttgtactcttcatta

SEQ ID NO: 780 - DNA, 559 bp, Homo sapiens
  misc_feature (36)..(36): n is a, c, g, or t
  misc_feature (51)..(51): n is a, c, g, or t
  misc_feature (56)..(56): n is a, c, g, or t
acttctcagcaaataaatctcccttaagtaggaaanctagatttcatattngcttnctttgaattaacagcaactttccacaggtaaatctgttcttgcaaagatgtgagcagaatagttaaaaataatatttttatgtttcatggttctaaatggaagccataaatgcagtaaatactatctgttgtttaactactttaatcgtcattttttacattttcaagtttattaggttaagaaaaacagggcagccttggaaggcagctactacagaaaactgcagttttgcgttaaagataaagtagtattttcagctccctgaaaaaccattcctgctgaaactgctgtagaaattgtgaagctgcatgagtggagagtattgaatctgtggttatagtagttttctcaggtttgtttatcttgatgtttgatgcactgtgttttatagttattaaaattgagtaatattatttctatgcagtgttatgtgtcattggccttttgtgaatgtgcatgttttaaactgcaaattttaaacattttgtcctctaattgttat

SEQ ID NO: 781 - DNA, 507 bp, Homo sapiens
atattcctacatcaagttactactgagagtaaatttattttgagttttatcccgtaagttctgttttgattttttttaaaaaacaaacccttttagtcactttaatcagaattttaaatgttcatgttacataccaaattataatatctaatggagcaatttgtcttttgctatattctccaagattatctcttaagaccatatgccccctgttttaatgtttcttacatcttgtttttactcatttctgactggacaaagttcttccaaacaattctgagaaacaaaaacacacacgcagaattaacaattcttttccctgtgcttcttatgtaagaatcctcctgtggcctctgcttgtacagaactgggaaacaacacttggttagtctcttttaagttacaaaaagccaattgatgtttcttattctttttaaattttaaatattttgttataaatactcacaggataccttatttccctagctatcatctcctgacttaatg

SEQ ID NO: 782 - DNA, 480 bp, Homo sapiens
aaaatccaagacactatgccaatgcaaccgtgactactttgggagattggtagtctcttttgatggtgatagtgatggggtgcactatcataatcacatcaggtctgctttttgcttttaatgttaactaatgaagttccagagatgggccttagaaatgtgttttaagaattaacaaggagtctcaaaaagaaatgagagggatgcttcctttcccttgcatctacaaaacaagagagagactgttctgttgtaaaactctttcaaaaattctgatatggtaaggtacttgagacccttcaccagaatgtcaatctttttttctgtgtaacatggaaacttgtgtgaccattagcattgttatcagcttgtactggtctcataactctggttttggaagaataatttggaaattgttgctgtgttctgtgaaaataacctccccaaaataattagtaactggttgttctacttggtaat

SEQ ID NO: 783 - DNA, 341 bp, Homo sapiens
gttcagtacatcatgctcttgtgcctctgcctgcttttcctgcgttcccaccctgtattccccccgcctttcgggtttccagggcttcgagcttgatcttttgaaagttttattctattaaatttttgctatatcttctggttttctgaaaaagctttagaatggtttctataccctttgtatcactgcatttttccatatcatctccggttcgatcgcgtccagatggaaaacggaagcagaggcttctaatcgtcgcatttactggctccagtgcaacacatccatctgaaaacactcggaagtctggtgcttggagagggtgccattgtctcttgtac

SEQ ID NO: 784 - DNA, 490 bp, Homo sapiens
acatgcatactttattgtgggccatgaaccaaatggttcttacttttcctggacttaaagaaaaaaagaggtttaagtttgttgtggccaatgtcgaaacctacaagatttccttaaaatctctaatagaggcattacttgctttcaattgacaaatgatgccctctgactagtagatttctatgatccttttttgtcattttatgaatatcattgattttataattggtgctatttgaagaaaaaaatgtacatttattcatagatagataagtatcaggtctgaccccagtggaaaacaaagccaaacaaaactgaaccacaaaaaaaaaggctggtgttcaccaaaaccaaacttgttcatttagataatttgaaaaagttccatagaaaaggcgtgcagtactaagggaacaatccatgtgattaatgttttcattatgttcatgtaagaagccccttatttttagccataattttgcatactgaa

SEQ ID NO: 785 - DNA, 398 bp, Homo sapiens
ccttactaaaagcccctcatatatcaattactttatttcattatgactacttaggttccgggctggggacaagttcacttaaaaaggcaatgttatttaacaggtcaccagttaagacttctgctttgtagatacatgcagaagccatcaaacaagggggagcttttaactgcaacaataagctaaagtatgtaaaatactacattctattcagtcttggagtgttttgtagaaagttatcttcagccaaatctttgctgaagactggttgtggagtgttggtaaatgctttgtgtttttatgtaaaatattttctaaacaaaaaatgttaaaagtacatgtcctctgtagtaaactgatatctatatatatgaatcattcaagcctaaagtctagta

SEQ ID NO: 786 - DNA, 528 bp, Homo sapiens
  misc_feature (106)..(106): n is a, c, g, or t
  misc_feature (185)..(185): n is a, c, g, or t
  misc_feature (189)..(190): n is a, c, g, or t
  misc_feature (196)..(196): n is a, c, g, or t
  misc_feature (245)..(245): n is a, c, g, or t
  misc_feature (284)..(284): n is a, c, g, or t
ggaagaagacaagccccactagggccaagggcagcagagccctgccgagtgagaggctgtggggcagcggctctgtcctgtgccttaccagccctggggagggggncatttggctggaagactggaatttaattgccatcgtctttgattttgtgacatttctgcttggaagtgtgaactacccncccnncccccngcttcctgctccttagcatgcgtgcagctctctcctgttttgggtgttncccttggacactccagctcggggactgctggcgtgtgantgtgcagattcccctgtgtggtcgaacctaagaactgtggcttggaagtgatgctccatgtgacgacgactttgctttctttcctcttagtgaggaggtgattcgtagatcccaactgcctatgtaatgtaaataatgtacatttaatttattgctatggtagcacattgtatttgttaatgtacaaaacaaattctaaaaggttgacaaatgtatattttgttgcttaaatgtgtctttgcag

SEQ ID NO: 787 - DNA, 543 bp, Homo sapiens
tatactcactcaaggcagtgcaagatcttgaagtactttttagcagttaagtaatattgaattgtattgaatagtttacatagtttattctagtctttgaaaattactgaacatggacaatgtgcatgtcattgacatctgccttagaacttctgggacaatcctgattcgagagattctatcccattatttacatataccaaaaatactttgttaatttaatgtgttggcttcccaactcctgaacacgacacaattttattattagattttgtatggtgattttaggctatgaaaacatgatcattatatgtatatagatacatttttatttgttacaaatgtttgagcagctcactagcccacccctcctctattttgggtaagagaatttactaccttttttaactatgtagttgagagcaacatgtattttgttatttttagaatggtcagtatattgctataaaattttaaatgagactatgaaagttaaagtattctgattctggttaaattaacgaatatggttccaggccctgt

SEQ ID NO: 788 - DNA, 444 bp, Homo sapiens
  misc_feature (33)..(34): n is a, c, g, or t
  misc_feature (36)..(47): n is a, c, g, or t
  misc_feature (49)..(49): n is a, c, g, or t
  misc_feature (51)..(53): n is a, c, g, or t
  misc_feature (55)..(56): n is a, c, g, or t
  misc_feature (58)..(58): n is a, c, g, or t
  misc_feature (60)..(61): n is a, c, g, or t
  misc_feature (63)..(63): n is a, c, g, or t
  misc_feature (66)..(74): n is a, c, g, or t
  misc_feature (76)..(80): n is a, c, g, or t
  misc_feature (85)..(85): n is a, c, g, or t
  misc_feature (208)..(208): n is a, c, g, or t
tccagcggaggccacaagtcctcctcttccggnncnnnnnnnnnnnntncnnntnngngnncnagnnnnnnnnnannnnnccaanatactaacaaaaccagagtaatcaagacaattattgaagaggtggcgcccgacggtagagttctttcatctatggttgaatcagaaaccaagaaacactactattaaactgcatcaagagganagagtctcccttcacacagaccattatttacagatgcatggaaaacaaagtctccaagaaaacacttctgtcttgatggtctatggaaatagaccttgaaaataaggtgtctacaaggtgttttgtggtttctgtatttcttcttttcactttaccagaaagtgttctttaatggaaagaaaaacaactttctgttctcatttactaatgaatttcaataaactttcttactgatg

SEQ ID NO: 789 - DNA, 548 bp, Homo sapiens
gtatcggaacagtacaacatctaaagagtaaatttggaaaaggctactttttggaaattaaattgaaggactggatagaaaacctagaagtagaccgccttcaaagagaaattcagtatattttcccaaatgcaagccgtcaggaaagtttttcttctattttggcttataaaattcctaaggaagatgttcagtccctttcacaatctttttttaagctggaagaagctaaacatgcttttgccattgaagaatatagcttttctcaagcaacattggaacaggtttttgtagaactcactaaagaacaagaggaggaagataatagttgtggaactttaaacagcacactttggtgggaacgaacacaagaagatagagtagtattttgaatttgtattgttcggtctgcttactgggacttctttctttttcacttaattttaactttggtttaaaaagttttttattggaatggtaactggagaaccaagaacgcacttgaaatttttctaagctccttaattgaaatgctgtggttgtgtgtt

SEQ ID NO: 790 - DNA, 196 bp, Homo sapiens
agaatacttgtaaaagcatatcacatcttaaaccagtggtgcacatgtggatttacagctcatggactctactgttcagctttaatttataaaacatatcacacatttaatgttatacagtatttacatatagtggaacatagggataactcagttttatgtaaatttttgttaagtgttgtagcctgcccagagt

SEQ ID NO: 791 - DNA, 542 bp, Homo sapiens
  misc_feature (208)..(208): n is a, c, g, or t
  misc_feature (461)..(461): n is a, c, g, or t
agctagaattaattgcccactctcccaccctaccagtgcagcccggcaagggcaggaattgggaggcctagggtgggcatgaaagcttgggaagcactgtcgtctctcagacaggcgtcctaaagacctctaggctggaagcttgggcttgcaagtggatccgggaccgagggtggtctcttggacaaccccaggaacttggaccaangcagagccaatcttgcaaactggccatggatggggaagtgcccggtagccagcatgagccacactaggaaagaggaggagggtgcagccaaacttaaggcaccggcaagtgttgtcagcactggaggagaccccgccagtggggtgaggccagccaagtccctgtgttacgaatggtgggccaaggggctgtctgctcggtcccagtaggacaggcagagctccaggctggcaccatggtaggcctccagggnaagagctgggaggcaggaatggcacactgggcaggcttgcccattcctggccctgagaatggagctgtagcctcatggaca

SEQ ID NO: 792 - DNA, 522 bp, Homo sapiens
tgctgtcaaatccttaatagctacaggagctactgagggaaatcagtgtcattatttaaagtcacgccttgtgtttttactactttattcagcaggattaaacctgaataacttttggctgttgtgctaatagtgtaaataaaataagcctgccttcataaaacactaacttttaaaaggaataaacgacttctaaaattatgcctattaacatgtgtaattagtcggcagctcaaatgtttgggagtgcaagaaattaggcaccccaggatataggtcatacagggatatataaaagccatgctcattacaaaatgagcagttgatgttttatgtggcattaagacaatcaagtcctcacaactctggaatgtcttcttatactgatgctgaatttatgaatccaaattaatttccaacaggttggaatcagatttaatgtgagatcatgatagacaagaccacagaggacgtatgctctatttcttgttggccaacagcttctttctaatgttctgtgaa

SEQ ID NO: 793 - DNA, 450 bp, Homo sapiens
  misc_feature (34)..(34): n is a, c, g, or t
gctcgacgtatttcaaacatttcaaaatgctttnatctatgtttatcacattttaataccacagcacttataatgatgtcactacatatagaagctcaaagttaagggatttgctgaagactgtaaagttaatggaagaattgagacaaaaatccagtgtagctggccacttatccagggctttttctacttcatcacaaggaatgttttgaaagtgtctgctttttttatccttaaaattcacctgtcagggaggcattaaaaatttggaaatgtatgccagcaaaatgtgagctctgtattttttggcattcttatgtttgggtttaataagattaagaaaatgatactgggaattttctttttcctgaaactttgaatcaccctagtaagtcaaagtactaaaaaatgtactagatcattaagacttatgtgctcttactgattgaa

SEQ ID NO: 794 - DNA, 544 bp, Homo sapiens
cacaggcaggtgactactccatgcgcgtggacctgcgggctggggacgaggctgtgttcgcccagtacgactccttccacgtagactcggctgcggagtactaccgcctccacttggagggctaccacggcaccgcaggggactccatgagctaccacagcggcagtgtcttctctgcccgtgatcgggaccccaacagcttgctcatctcctgcgctgtctcctaccgaggggcctggtggtacaggaactgccactacgccaacctcaacgggctctacgggagcacagtggaccatcagggagtgagctggtaccactggaagggcttcgagttctcggtgcccttcacggaaatgaagctgagaccaagaaactttcgctccccagcggggggaggctgagctgctgcccacctctctcgcaccccagtatgactgccgagcactgaggggtcgccccgagagaagagccagggtccttcaccacccagccgctggaggaagccttctctgccagcgatctcgcagcactgtgtttacag

SEQ ID NO: 795 - DNA, 558 bp, Homo sapiens
  misc_feature (158)..(158): n is a, c, g, or t
gaatcttcacagtaacatttcagaaaggtgcttttttggtactcttcatgggaacagtttagcagccatgagtgatcttcctttgaaagagaatgaaagaccctgtgacatttcacttcaaaaataagccctgtagctctttacggtcgcatagtatnaaattataccctgcatgctgaccctcgcttggaatggaatgccagaaatgcatggcagcagctaataagtaaagctgattaactatttatttgtcaatgttattatttaatgagctttcacatgtgatttgtttcaaaactttaattttttaatgttttgaaactttttcatggacctaaatattttcctatatgatttgtggttgattagaaatatgaaatacatgttgtagatatgtaaaatgaatattttagtctccttattacatatatgttcatggtgaactttatcaatagtatggatctttttaaatcaataagatgctttgtaaagttgaaataagtaatactttcttgtttaatctgtgcaatcagaaggtgtcttgaccttcaattcaat

SEQ ID NO: 796 - DNA, 431 bp, Homo sapiens
  misc_feature (178)..(178): n is a, c, g, or t
gcacacagagatttgagaaccattgttctgaatgctgcttccatttgacaaagtgccgtgataatttttgaaaagagaagcaaacaatggtgtctcttttatgttcagcttataatgaaatctgtttgttgacttattaggactttgaattatttctttattaaccctctgagttttngtatgtattattattaaagaaaaatgcaatcaggattttaaacatgtaaatacaaattttgtataacttttgatgacttcagtgaaattttcaggtagtctgagtaatagattgttttgccacttagaatagcatttgccacttagtattttaaaaaataattgttggagtatttattgtcagttttgttcacttgttatctaatacaaaattataaagccttcagagggtttggaccacatctctttggaaa

SEQ ID NO: 797 - DNA, 358 bp, Homo sapiens
agagcgacggctgcaacagtgcctttttgtctgttcccttgaccaatcttactgagaatggcctgatgtgccccgcctgcactgcgagcttcagggacaaatgcatggggcccatgacccactgtactggaaaggaaaaccactgcgtctccttatctggacacgtgcaggctggtattttcaaacccagatttgctatgcggggctgtgctacagagagtatgtgctttaccaagcctggtgctgaagtacccacaggcaccaatgtcctcttcctccatcatatagagtgcactcactccccctgaaaagctatctgaacagaggaagataatgtagtgtgaagtccccatttgtc

SEQ ID NO: 798 - DNA, 475 bp, Homo sapiens
  misc_feature (61)..(62): n is a, c, g, or t
  misc_feature (64)..(76): n is a, c, g, or t
  misc_feature (78)..(81): n is a, c, g, or t
caatctatattcacaggcccatacttcagtcagtccaatcatagtacagtgatcgaccaanngnnnnnnnnnnnnncnnnnttgtaaaatacggatcatttgtattttggggtgataaaatagttcaccatgggtatgagatatttattctttaaatcaaagtaaattagaatttttaaaaagcacaaaactgcaggacagtttatgaaataggtggcactattagggaatcttcctttaaagcaagaaatcatgttatttagaaagaaaaactaatcttaaacatactatttctaataaatatttatatttttatgaaataaagaggtatgtggaaattaatatttggtgatgttggacagtggaaaagtatctagagtttttacctgccttatctgaattcttcttgaaacttgagcttaaactctaatagctgtttccctttctattctgaacaactgtctccatttttcaa

SEQ ID NO: 799 - DNA, 519 bp, Homo sapiens
gaacagttctatgccaccagagaccactattttaccaactccctcctgtcattttttgagatgatcttggatcttcgctggacttatgttcttttctacagcccaagggaggttaaagtggtggccaaaggattttgtagtgccaatgggatcacagtctcagcagaccagaagtatgtctatgtagctgatgtagcagctaagaacattcacataatggaaaaacatgataactgggatttaactcaactgaaggtgatacagttgggcaccttagtggataacctgactgtcgatcctgccacaggagacattttggcaggatgccatcctaatcctatgaagctactgaactataaccctgaggaccctccaggatcagaagtacttcgcatccagaatgttttgtctgagaagcccagggtgagcaccgtgtatgccaacaatggctctgtgcttcagggcacctctgtggcttctgtgtaccatgggaaaattctcataggcaccgtatttcac

SEQ ID NO: 800 - DNA, 466 bp, Homo sapiens
  misc_feature (411)..(411): n is a, c, g, or t
ctccagcgacccaatggcgtgtaactcgccgcagtctccagcggtgtgggagccccagggctcgtcccgctcgctcagccaccaccctcatgcccaccctccgacctccaaccagtccccagcgtccagctacctggagaactctgcatcctggtacacaagtgcagccagctcaatcaattcccacctgccgccgccgggctccttacagcacccgctggcgctggcctccgggacactctattagatgggctgctctctcttactctcttttttgggactactgtgttttgctgttctagaaaatcataaagaaaggaattcatatggggaagttcggaaaactgaaaaagattcatgtgtaaagcttttttttgcatgtaagttattgcatttcaaaagacccccccntttttttacagaggactttttttgcgcaactgtggacactttcaatggtgccttg

SEQ ID NO: 801 - DNA, 549 bp, Homo sapiens
  misc_feature (148)..(149): n is a, c, g, or t
  misc_feature (189)..(189): n is a, c, g, or t
  misc_feature (191)..(194): n is a, c, g, or t
  misc_feature (339)..(339): n is a, c, g, or t
  misc_feature (399)..(399): n is a, c, g, or t
gaggcctcactctaagttattaccgtccccttcattgttttcaaagacatgtggtgatatagtttttaaaaataactattttgttatagatcataatatgcataaaactgtacagaaatattttgtaatgtgttgattttaaaaaaannatctgtaaataaagttttaaaaaaagaattcaaatggcanannnngaaatatgtagatattttgctatttatttaaaggagtattttaagagatattgaactatctgaaattgaccagtaatcaaagttccaatcatctgaatgcttttccttgaggtagaatgtgagtctcagaaatgactgcattacntgcccttttttgcaccttttctgtctttttattttgcagaacaacaacaacaacaaaatngtgccttagctgtatttttttgtctaggggagtttgtttctgtctgacaaagcaacattttttgcagaaaacagtggatgtattaaatactgtatcataccaaaaacactgcaggtgtatatagatgctttctgtcatactgtgttttca

SEQ ID NO: 802 - DNA, 515 bp, Homo sapiens
  misc_feature (101)..(101): n is a, c, g, or t
  misc_feature (106)..(108): n is a, c, g, or t
  misc_feature (125)..(126): n is a, c, g, or t
  misc_feature (222)..(222): n is a, c, g, or t
  misc_feature (225)..(228): n is a, c, g, or t
actgtgagttccactgaatacattttaatgtctgtaggaagaatcaaaacacctatttaaagatggcaatatataataatcattttaaaagtatttgattnaaccnnntaattttccagaaatgnnaaaaaaaaaaatcagctctaaaaccaaagctgatttcagaaaatttgaaaatgtaaatcagccctatccataatatagtttctctaaaactttatnttnnnnagtcattttaaaataatataactattaaaaaatgtaactgctatcttaatgttctgaaataatttaaaacattttaaaatatgaatactgtagtataaaagaaagaaatggtgggaacgaaaagcagagaaagaaatgccaattccagtccaaagttttatttgccaagttttcttagaatgaattttaccagtttatgaattattgtaaacagaatgtgtcatggaaatactgaaagatttttccctagagtggccttattgactgctggtgtgatgccactgtaa

SEQ ID NO: 803 - DNA, 197 bp, Homo sapiens
tcagctttaccctctgaacttctgatcgaaggtcatccctctccagcttgagtggatcaaagatgacaagggccaatggaaccaagtttgagtcttgccaggtcaatacttgggtcctgagtatggtgactagtatctgttttgttatgtgtgtattattccagccagaatgggaaatgctaattcagctcctccag

SEQ ID NO: 804 - DNA, 483 bp, Homo sapiens
  misc_feature (48)..(48): n is a, c, g, or t
  misc_feature (212)..(212): n is a, c, g, or t
ggaattcttgttcaatactggcaggagtgaaaattggtagaacctttntagaaggcaatttggcaacatgtatgaaaacctaaatgttgatacacctttacccagcagtttgtttaggaatttatcctaatgaataaaagttgtccaagtcttcaaacatgagcccaaaggtatatttcatgatgtttatgatattaaaacattggaaacanctgaaacatccttcagtaaaagatggattaaataaattccatgcagttgtcatttaaaaatatttagatatatgtttattgctatggatatatgttcccaaaatattattgaatcaaaaagtagactacaggatatatgttgaatatgagctcatttataacattgaatattttaagataatgtatgtttcatagagagatcttcaccaaatgttaaggatttttttttctgggctgtggtatttgggtgatctttacattcttcagactc

SEQ ID NO: 805 - DNA, 508 bp, Homo sapiens
  misc_feature (224)..(224): n is a, c, g, or t
  misc_feature (260)..(261): n is a, c, g, or t
ggttacctcccacagaacgtggtggactccttcttcccccgcagcatgacccggttttatgccaaccttcagaaagcagtgaagcaattccatgagtaatgctatcgttacttcttggcaaagaactcccgtgactcatcgaggagctccagctgttgggacaccaaggagcctgggagcacgcagaggcctgtgttcactctttggaacaagctgatggactncgcatctctgagaatgccaaccagaggcggcagccnncccttcctgcctcctgccccactcagggttggcgtgtgatgagccattcatgtgttccaaactccatctgcctgttacccaaacacgcctctcctggcagggtagacccaggcctctaaccatctgacagagactcggcctggacaccatgcgatgcactctggcaccaaggctttatgtgcccatcactctcagagaccacgtttccctgactgtcatagagaatcatcatcgccactgaaaacca

SEQ ID NO: 806 - DNA, 494 bp, Homo sapiens
ccctggatgcgcaagctgcacataagtcatgacaacataggcggcccggaaggcaaaagggcccggacggcctacacgcgctaccagaccctggagctggagaaggagttccacttcaaccgttacctgacccgcagaaggaggattgaaatagcacatgctctttgcctctccgagagacaaattaaaatctggttccaaaaccggagaatgaagtggaaaaaagataataagctgaaaagcatgagcatggccgcggcaggaggggccttccgtccctgagtatctgagcgtttaaagtactgagcagtattagcggatcccgcgtagtgtcagtactaaggtgactttctgaaactcccttgtgttccttctgtgaagaagccctgttctcgttgccctaattcatcttttaatcatgagcctgtttattgccattatagcgcctgtataagtagatctgctttctgttcatctctttgtcctgaatggct

SEQ ID NO: 807 - DNA, 533 bp, Homo sapiens
  misc_feature (26)..(26): n is a, c, g, or t
  misc_feature (42)..(42): n is a, c, g, or t
  misc_feature (48)..(48): n is a, c, g, or t
  misc_feature (75)..(75): n is a, c, g, or t
  misc_feature (83)..(83): n is a, c, g, or t
  misc_feature (121)..(121): n is a, c, g, or t
aagtggggcaaggatggaccagcagnaaggggggtaaggctnctgttncacttccccctgcctccacagaacgangccacggnattccgttatcttcctccagttttgttccttctccagncctcagttccaccaggtgtcaggactgcatgggggcctggggcaggcagaggagtcaggccagggtccctgacggagcagcactcagcatgtgagtgaggccacagaaaaactctgccccactgcttcttacctcacgggggtggctttcagggattctttagcgcagcagattaaaatcttgccacagtcgagaaattgacaacaagcttccatgctgtacatggttctctttttctctcttttatttttaaaaagaaaacccagaaagatgtaccagatttgtgtaaatgagggtatgccagaaggtggccagttttgctttatgatcttatgaaggaagatttgtgaccctacgtatatatatacacacacatacatatatatatatatcccgaaccaacaacgggact

SEQ ID NO: 808 - DNA, 358 bp, Homo sapiens
  misc_feature (146)..(146): n is a, c, g, or t
  misc_feature (180)..(181): n is a, c, g, or t
gaaactgtatgggtagcttttttgtttgttttttgttttgtttttgtttttgtttttgtttttagttgtaggtcgcagcggggaaattttttgcgactgtacacatagctgcagcattaaaaacttaaaaaaattgttaaaaaaanaaaaaaagggaaaacatttcaaaaaaaaaaaaanngataaacagttacaccttgttttcaatgtgtggctgagtgcctcgattttttcatgtttttggtgtatttctgatttgtagaagtgtccaaacaggttgtgtgctggagttccttcaagacaaaaacaaacccagcttggtcaaggccattacctgtttcccatctgtagttattcg

SEQ ID NO: 809 - DNA, 424 bp, Homo sapiens
  misc_feature (263)..(263): n is a, c, g, or t
agaacctgtcgtaccagcatcatgagctggatgcaggagcccatggctgaaaggagttaaaacgcccagtggtcattaagtgaaacatcttttatcaacctgcaaaagctgcagcgttctctgccaggtcaaatgggcatgtttagaaaataagagaagatggctgagtatagctaatgaataaatggttgtttctttagaaaattaaacacacacagagtgtaagaggagaggatacggccctccctgaaggataaagtccncctggacggtgccctgccctcgcttctcacattaactgcccaggaatgtcatgctgattggttcccggaagggtgtttggcaaggggcagtgtatggagctacgtgtagaaggagagaaatttgtgtgtggcttttgtaaattttgaccgattgcagcaat

SEQ ID NO: 810 - DNA, 478 bp, Homo sapiens
  misc_feature (333)..(333): n is a, c, g, or t
  misc_feature (360)..(360): n is a, c, g, or t
tagagactcccctctaaataatttactcctacattgtaaatacattgatgccaacaaaattccaactgctactaacaaaggtttggttggtgataagctaataacagctactttgtgtaggaggtaaatatgtgtactggagggggtaaaaatccatttaggttatggcaaagatgggaatcaaactgtaaaactcatagccccataaaattaatattctttgttaagtgccagagggtttaagagaacttcttgcttagagtttattgataataataatgcttcagaatatcccatttaaatgtacagtgtaaatatgtaaaatattttacnttcccaggcaagtttgtggctgtattnccacttagtggctctttgtgactggcagttctgtatatctgaaacaaataagctgtaagcacttttgttaaaactttgtcaaataatccttttatgtacttgttctcagacctgttct

SEQ ID NO: 811 - DNA, 529 bp, Homo sapiens
ggggtcttgtctgtcaaagcaaatgataagttcactcaggccattattgactgctgaactctcttccttcccaactcttccttgaaagagaaaaaaatactttgccttcttgctctccttatcaaatgtttttgtacaaatagtgtaagcctgtttaagcaaaccaattaaaataggcactgattattttgatctgtttgtaacaaatgaatgtaagtactatttacatggtgtgcctaggaggagctgaaatcattggcactttaatccatattgtaaagatcagtatcaaaagcatagtgttcttcacctctcctcctcagcatccatctctatatacttgattaaatggaaaagtctcttttatcacctctatgtaaagttttatgggtagttatcgtcagtgtatttaaatatatcttctagtatgttttaaaggctggtcttcaatactgtggagacaaaaaataaaagagcgtatgaaaagtacgttagacttttgctggcattcaagtcatggctagtctgt

SEQ ID NO: 812 - DNA, 554 bp, Homo sapiens
aatagctacagactggaagccagccaaatctccattgatagggaattgatggaaggaactagggtatatctatacaatgggatactacacagctgtagaaaggactgcgaactatttttgtagttctggtctggagaaatctccagaatataggaaatgaaaaatgtaaagcacagaagagaatgtatggtgtgctgtctgttgtataacgaagagacaaatggaaaaaatatgtatttgctttttttgtaaagcaatagaagaattagttataccaataactaataaaatgatctccttgttagtggtggtagggagctagacaaggatggcaactatttctgtatcttacataccttttattttgaggccctgtcaatgttttatataataaacattttttgaaaaggcaactcttaaaactaaaacaaacttaacagtctgtcaagttggtgatataaccccacagaagacttacttcaagtgacttgaaaacttagtattttgtctgtactttgctaatggaatatatcctacagaccaaacaaccacaa

SEQ ID NO: 813 - DNA, 533 bp, Homo sapiens
ctggcctttggtgaccactgagaaggacacttcacgggcccagagctcctggtactgcccttcctttgagggccgtggagggctgtggacagcccagcaacctgtcgctcttggaggctggtgtggccttgaggagggaagcctcgcatggccgctggaagagaggcgcctcctggcctggctctgcagaacccaggggcacgctctgggcctgggctgaggaagtcccgctctccccgcggctctgagttggactgaggacaggtgtgggcgccagtgtgggtgcaggcgcaggtgcaggcacagggccactgtcctccaggcaggctttttggtgctaggccctgggactggaagtcgcccagcccgtatttatgtaaaggtatttatgggccactgcacatgcccgctgcagccctgggatcagctggaagctgcctgtcatctcctgcccaatccccagaaaccctgattcaggtctgcaggctcctgcgggctcaccaggctgctggctccggtaccatgtaaaccta

SEQ ID NO: 814 - DNA, 493 bp, Homo sapiens
  misc_feature (76)..(76): n is a, c, g, or t
agttttgcttttgactccaggaacaaaaaggtaaatcccacatcccagtttctcagaagtccctgtttattccaantgccatcagatgtgtgcaatgtggcaaactgaagctgcacagtgttggtttccttgtattctgaggatgttaaagactttgttaaatggttatccaattgctctttcacaggtagcctattaaactattttaatatgtttttttaaacctcataaaaatctagcacactcttctcttgagcagttagcagacctaaagcaagcctgaattggctatgcagtacattgtattctgtttgggggaatttgttttagccattttctttaattaccagttttccagaacactcttagctatgttgacatgaggcagttccttccaggtgattctgtttccttaagtattatataaactgtgccaatacagacaaagcataatcaatataatctgaattattgttatctttacctcctgagt

SEQ ID NO: 815 - DNA, 295 bp, Homo sapiens
gtatttggtcccagttgggtacattttaaaatcctgattttggagacttaaaaccaggttaatggctaagaatgggtaacatgactcttgttggattgttattttttgtttgcaatggggaatttataagaagcatcaagtctctttcttaccaaagtcttgttaggtggtttatagttcttttggctaacaaatcattttggaaataaagattttttactacaaaaatgaaatttgtttggacttccacttgagacagtaaagagagtattagacacccagtaaaaactgccat

SEQ ID NO: 816 - DNA, 422 bp, Homo sapiens
atggctctggaaaaccagctgctacttccaaatctattgtccataatggtttctttctgaggttgcttcttggcctcagaggaccccaggggatgtttggaaatagcctctctacccttctggagcatggtttacaaaagccagctgacttctggaattgtctatggaggacagtttgggtgtaggttactgatgtctcaactgaatagcttgtgttttataagctgctgttggctattatgctgggggagtcttttttttttatattgtatttttgtatgccttttgcaaagtggtgttaactgtttttgtacaaggaaaaaaactcttggggcaatttcctgttgcaagggtctgatttattttgaaaggcaagttcacctgaaattttgtatttagttgtgattactgattgcctgatt

SEQ ID NO: 817 - DNA, 352 bp, Homo sapiens
gtcacactttatggtctctggaccccttaatgtctgattcatgtagcagaagccagctagattttcatctgtctctattcattttgttgtgatgtcatggatcatgtggcctctggaaaactctactgtatactcgagaatgagaatataacaggcaaaataacattatcatgaaaatagttttgacctcatgaaccccatgaaaggttccccagaccaaaattttagaatcactggtatagggtaacactttattgtgtaaattcagttctctgtaccccacttaaatatgtattattatctcttgacattattttcccaaaaaatgctgtttgatttcttacttgttctg

SEQ ID NO: 818 - DNA, 335 bp, Homo sapiens
acaaggcccaggctggggccagggccagaggggaaggccctggattctcactcatgtgagatcttgaatctctttctttgttctgtttgtttagttagtatcatctggtaaaatagttaaaaaacaacaaaaaactctgtatctgtttctagcatgtgctgcattgactctattaatcacatttcaaattcaccctacattcctctcctcttcactagcctctctgaaggtgtcctggccagccctggagaagcactggtgtctgcagcacccctcagttcctgtgcctcagcccacaggccactgtgataatggtctgtttagcacttctgtat

SEQ ID NO: 819 - DNA, 261 bp, Homo sapiens
gaatgaagaaaagtcgcctcaacgacaaacaaaagcaccgactagatttccttcagctgatgattgactcccagaattcgaaagaaactgagtcccacaaagctctgtctgatctggagctcgcagcccagtcaataatcttcatttttgctggctatgaaaccaccagcagtgttctttccttcactttatatgaactggccactcaccctgatgtccagcagaaactgcaaaaggagattgatgcagttttgcccaata

SEQ ID NO: 820 - DNA, 245 bp, Homo sapiens
ggtgaggggatgacccctggagatgaagggaagaggtgaagccttagcaaaaatgcctcctcaccactccccaggagaatttttataaaaagcataatcactgattccttcactgacataatgtaggaagcctctgaggagaaaaacaaagggagaaacatagagaacggttgctactggcagaagcataagatctttgtacaatattgctggccctggttcacctgtttactgttatcacaata

SEQ ID NO: 821 - DNA, 273 bp, Homo sapiens
acttaggtaattgtagggcgaggattataaatgaaatttgcaaaatcacttagcagcaactgaagacaattatcaaccacgtggagaaaatcaaaccgagcagggctgtgtgaaacatggttgtaatatgcgactgcgaacactgaactctacgccactccacaaatgatgttttcaggtgtcatggactgttgccaccatgtattcatccagagttcttaaagtttaaagttgcacatgattgtataagcatgctttctttgagttttaaat

SEQ ID NO: 822 - DNA, 492 bp, Homo sapiens
ttgtcaaggggctttgcattcaaactgcttttccagggctatactcagaagaaagataaaagtgtgatctaagaaaaagtgatggttttaggaaagtgaaaatatttttgtttttgtatttgaagaagaatgatgcattttgacaagaaatcatatatgtatggatatattttaataagtatttgagtacagactttgaggtttcatcaatataaataaaagagcagaaaaatatgtcttggttttcatttgcttaccaaaaaaacaacaacaaaaaaagttgtcctttgagaacttcacctgctcctatgtgggtacctgagtcaaaattgtcatttttgttctgtgaaaaataaatttccttcttgtaccatttctgtttagttttactaaaatctgtaaatactgtatttttctgtttattccaaatttgatgaaactgacaatccaatttgaaagtttgtgtcgacgtctgtctagcttaaatgaatg

SEQ ID NO: 823 - DNA, 519 bp, Homo sapiens
  misc_feature (118)..(118): n is a, c, g, or t
  misc_feature (125)..(125): n is a, c, g, or t
  misc_feature (133)..(133): n is a, c, g, or t
  misc_feature (136)..(136): n is a, c, g, or t
gagtatacatcggtgcaggcttcctggatgacagttgggtgatatgtgtcatgtggcctaaaagcctccatgtcatttgacctacgaattctatctttgggaatttatcctaagaaantacttanggatttanttngtgataagatgttcatcccagcattgcaatggagaaaaatgggaagcaatggtttggttgggaatttattccttttctgctgtaacgaaagtttgcaataggggattgcttaagtaaattattgtatctccatccagatggtggagtaccgcgcagacattaaaagtcatgtaaaagaacatctgactgaaagaaaaatgctccttgaatattaaaaggttgtaaaaatagtgcatgttatgtgatttcaattttgttttttaaaatatgggtgtatgcttgtatacgtagagcagataaaaaagacggaaggcatactaaaaaatgttgagtggttatctttgtatggtggaacaaagtcactgtaattttcatctttggtt

SEQ ID NO: 824 - DNA, 375 bp, Homo sapiens
  misc_feature (310)..(310): n is a, c, g, or t
  misc_feature (312)..(312): n is a, c, g, or t
tcccttgccttcactgtaatgcttaatggttgtgtagtcttatacgtgactcctgacttcaaggatcctggtctgtacctctttaggtcaacacgttttgagtgaactggtgttggttatttggaattagatataaagtcatatattctttggtgaggaatggcttcatataggagttcacattcaaaacaagctttgacaaaataatagagtgaaaattggtagatcagagttgagctgattggaggaccaaattaaaagactggctgggcatgatggctcacacctgaaaacccagcactttgggagncnaaggcaggcagattgtttgagcccaggaattcaagaccagcctagataacctgggtatcccag

SEQ ID NO: 825 - DNA, 387 bp, Homo sapiens
  misc_feature (74)..(74): n is a, c, g, or t
  misc_feature (99)..(99): n is a, c, g, or t
  misc_feature (112)..(112): n is a, c, g, or t
  misc_feature (128)..(128): n is a, c, g, or t
gagcacatatcttacaaaacaccaaaaaattcatagtgaagagaaatcaaatatacatactgagtgtggggaanccattagacaaaactcttctttttnacaacaataaaancctcacactggagagnttctctgaatgccttaagaatttggttaatatggagacccttcccagggaaacagaaggaggatcgtgaaaactgttgactacttagaatgatcacatggtttagtggagagagcatgattctgggttttaaaagtcatggatctcaatctcagctcctattactaactagatcttttactttggggtaagtcacttcatatctttaggccttaatttcctcatctgaaaaactggaaggcctgacttgttgagcttta

SEQ ID NO: 826 - DNA, 178 bp, Homo sapiens
  misc_feature (119)..(119): n is a, c, g, or t
  misc_feature (124)..(124): n is a, c, g, or t
tatgactgctaaaagaaccaacccaggacagagccacaatcttcctctatttcattgtaatttatatatttcacttgtattcatttgtaaaactttgtattagtgtaacatactccccncagtntacttttacaaacgcctgtaaagactggcatcttcacaggatgtcagtgtttaa

SEQ ID NO: 827 - DNA, 426 bp, Homo sapiens
gagagtggttggggggagtgggagaggtttgggggctgggaagacaagggaaaagaaaatgcaggtatatgctatttgtgttcattttgtctttgaaaatcgtaagtgtacagcatcattctcgggcagagtctgggaggacttgagttgactgctacagtttatgatcttccctaaacatcgacgttcctggaaatctttggcctctgagctgacttcttctctgttgcttgtgagccaggaatttaacagctctgttgtatgtgcaggctgcagatgcttctcttcagcttttgctatccaatgtgtgtgtgtgtgtgtgtgtgtgtgtgtgtgtgtgtgtgtgtgtgtgtgtgttggataaacttaaaaaacctgttgcttccatgcaacggcccacacaacttgggactcatggtcagcctc

SEQ ID NO: 828 - DNA, 400 bp, Homo sapiens
tctgttccaaaatgtacggaccccacttacaatgaaattgtagtatatgatgaagtcacagagctccaaggacatgtcttaatgcttattgtgaagagtaaaactgtatttgtgggagcaattaacatccgactctgtagtgtcccactcgataaagaaaaatggtatccattaggaaacagtataatttgaccattgctatgaacatatgcattattcattaactacttgtatttttttcacttccgggcctctgaatcacataagtaaggcatctttgttgtcaaagacagcacagggtattaaggacacagaaaaaaaatcagaattagtcttttgtgttgtttattttctacctgtgctttcattgttttttcataatcttttctccttcagtgga

SEQ ID NO: 829 - DNA, 520 bp, Homo sapiens
taaagcctttaactggtcctcaactcttactaaacataagagaattcatactggagagaagccctacaaatgtgaagaatgtggcaaagcttttaaccggtcctcaaaccttactcgacataagaaaattcatactggagagaaaccatacaaacctaaaagatgtgacagtgcttttgacaacaccccaaacttttctagacataaaagaaatcatatgggtgagaaatcctagaaatgtgaagaatgtgacaaagcctttaagcggttgtcacacttgattgtatataagataattcatactggagaaaactcccagaagtgtgacaaatgtgacaaaacatttaattaattctcataccttattgcacaggaaagcatttatacttgagaaaaattgtataaagaatggaaaagtcattaatatctgctcatatcttaacatcagcgagttggtatttaataaaagcattatcaatgaaattactggcaaaagatctttcagaccatataagcctgc

SEQ ID NO: 830 - DNA, 347 bp, Homo sapiens
  misc_feature (223)..(223): n is a, c, g, or t
cactgctagcagggcttcaaccaggaagggatcaacccaggaagggatgatcaggagaggcttccctgaggacataatgtgtaagagaggtgagaagtgctcccaagcagacacaacagcagcacagaggtctggaggccacacaaaaagtgatgctcgccctgggctagcctcagcagacctaaggcatctctactccctccagaggagccgcccagattcntgcagtggagaggaggtcttccagcagcagcaggtctggagggctgagaatgaacctgactagaggttctggagatacccagaggtcccccaggtcatcacttggctcagtggaagccctcttt

SEQ ID NO: 831 - DNA, 519 bp, Homo sapiens
  misc_feature (326)..(326): n is a, c, g, or t
  misc_feature (374)..(376): n is a, c, g, or t
  misc_feature (398)..(401): n is a, c, g, or t
gaaccacctcaatgcaaagattctacgggaaaatgtgggccccctccacctattgacaatggggacattacttcattcccgttgtcagtatatgctccagcttcatcagttgagtaccaatgccagaacttgtatcaacttgagggtaacaagcgaataacatgtagaaatggacaatggtcagaaccaccaaaatgcttacatccgtgtgtaatatcccgagaaattatggaaaattataacatagcattaaggtggacagccaaacagaagctttatttgagaacaggtgaatcagctgaatttgtgtgtaaacggggatatcngtctttcatcacgttctcacacattgcgaacaacatgttgggatgggnnnctggagtatccaacttgtgcannnngatagaatcaatcataaaatgcacacctttattcagaactttagtattaaatcagttcttaatttcatttttaagtattgttttactcctttttattcatacgtaaaattttggatta

SEQ ID NO: 832 - DNA, 416 bp, Homo sapiens
cagcccactctcaagattttgaagacatttgcctttgttttcctccagaaactttatagttttagctgttggatctgtgattatcaccagttgatttttgtgtatggtgtgagggggggatcaagatttattttgtatatggacatccatctactctacacatttattgaaaaaaacaacacctttcttttcccattgaattgcgtggggactttgttaataaatgaatggtcatatatttgggtctgtttctggactctgttctttccacttggactaattatccattcttgcatcagtaccatacttttttaattactgtagtttatggtaagtcttgacatggtattgtaaaccctccagttttgttcttttaaacaaatgttttgactatttaagtgctttacatttccata

SEQ ID NO: 833 - DNA, 482 bp, Homo sapiens
agcagatggagcccaaaagcttttggtgaaggccaaagcagctgagaaagcagcaaatattctattaaatcttgacaaaacattgaaccagttacaacaagctcaaatcactcaaggacgggcaaactctaccattacacagctgactgccaatataacaaaaataaaaaagaatgtgctgcaggaatttgttgagctgaaaaaacaatatgctattctccaacgtaagacaagcactacaggactaacaaaggagacattaggaaaagttaaacagctaaaagatgcggcagaaaaattggctggagatacagaggccaagataagaagaataacagatttagaaaggaaaatccaagatttgaatctaagtagacaagcaaaagctgatcaactgagaatattggaagatcaagttgttgccattaaaaatgaaattgttgaacaagaaaaaaaatatgctaggtgctatagctaggcag

SEQ ID NO: 834 - DNA, 212 bp, Homo sapiens
ccttatcatccgtcacaggggtcagaaaggacctcgagggcctccaccagcaggtcaccttctgtgatccccatcccaaggcactggtggtgactctgcttcctgcactgacccagagcctctgcctgtgcactgcaagctgtgtctactcaggccccaaggggactctctgtttccattctccccccacagacctgtcaagagaagcatga

SEQ ID NO: 835 - DNA, 264 bp, Homo sapiens
ttcctaaatggtcttccttttccattttttcccttgtaaaataatctgcttttaatttagcgagctcttctcatgtgtttatcatttaaatgaataagtaaatgagggcagtttgcttactggttaagaaaggatgcaggctttagggctggaagcacctggtttcaaagcctggctctgcctcttatcagctgcgtaacctttggacaagttgctttattgctctaagtttcagtttcctcctgtgtcaactctagaggactg

SEQ ID NO: 836 - DNA, 484 bp, Homo sapiens
  misc_feature (190)..(190): n is a, c, g, or t
  misc_feature (420)..(420): n is a, c, g, or t
  misc_feature (424)..(424): n is a, c, g, or t
tgggatttagtcagtcacagagatactattactatgagtaagaaattaatggcaaaggaattaatccaagaatagaagaatgaagcaagttcactttcaatcaagaaacttcataatactttcagggaagttatcttttcctgtcaatctgtttaaaatatgctatagtatttcattagtttggtggtancttatttttattgtgtaatgatctttaaacgctatatttcagaaatattaaatggaagaaatcaatatcatggagagctaactttagaaaactagctggagtattttaggagattctgggtcaagtaatgttttatgtttttgaaagtttaagttttagacactccccaaatttctaaattaatctttttcagaaatatcgaaggagccaaaaatataaaacagttctgnatanccaaagtggctatatcaacatcagggctagcacatctttctctattatccttctattgga

SEQ ID NO: 837 - DNA, 383 bp, Homo sapiens
  misc_feature (319)..(319): n is a, c, g, or t
gacagaccaaagttaaacaagcctccggaaactcttatcactactattgattctagttccagttggtggaccaactgggtgatccctgccatctctgcagtggccgtcgccttgatgtatcgcctatacatggcagaggactgaacacctcctcagaagtcagcgcaggaagagcctgctttggacacgggagaaaagaagccattgctaactacttcaactgacagaaaccttcacttgaaaacaatgattttaatatatctctttctttttcttccgacattagaaacaaaacaaaaagaactgtcctttctgcgcncaaatttttcgagtgtgcctttttattcatctactttattttgatgtttccttaatgtgtaatt

SEQ ID NO: 838 - DNA, 507 bp, Homo sapiens
gattcctgtgggtccagctttggaactgggaaacctttcttcggatccgcactcattccactgatgccagctgcccctgaaggatgccagtactgtggtgtgtgagtctcagcagccgcccacacgctcctaactctgctgcatggcagatgcctaggtggaaatagcaaaaacaaggcccgggctggggccagggccagaggggaaggccctggattctcactcatgtgagatcttgaatctctttctttgttctgtttgtttagttagtatcatctggtaaaatagttaaaaaacaacaaaaaactctgtatctgtttctagcatgtgctgcattgactctattaatcacatttcaaattcaccctacattcctctcctcttcactagcctctctgaaggtgtcctggccagccctggagaagcactggtgtctgcagcacccctcagttcctgtgcctcagcccacaggccactgtgataatggtctgtttagcacttctgtat

SEQ ID NO: 839 - DNA, 502 bp, Homo sapiens
ctggagtctggggtgtgttgtcatagagatggtgactggcaaggtttgcacagatgaagaatgaagcctagtagaatatggacttggaaaattctcttaatcactactgtatgtaatatttacataaagactgtgctgagaagcagtataagcctttttaaccttccaagactgaagactgcacaggtgacaagcgtcacttctcctgctgctcctgtttgtctgatgtggcaaaaggccctctggagggctggtggccacgaggttaaagaagctgcatgttaagtgccattactactgtacacggaccatcgcctctgtctcctccgtgtctcgcgcgactgagaaccgtgacatcagcgtagtgttttgacctttctaggttcaaaagaagttgtagtgttatcaggcgtcccataccttgtttttaatctcctgtttgttgagtgcactgactgtgaaacctttaccttttttgttgttgttggcaagctgcaggttt

SEQ ID NO: 840 - DNA, 328 bp, Homo sapiens
gatttcttttcaccattcgtacataatactgaaccacttgtagatttgatttttttttttaatctactgcatttagggagtattctaataagctagttgaatacttgaaccataaaatgtccagtaagatcactgtttagatttgccatagagtacactgcctgccttaagtgaggaaatcaaagtgctattacgaagttcaagatccaaaaggcttataaaacagagtaatcttgttggttcaccattgagaccgtgaagatactttgtattgtcctattagtgttatatgaacatacaaatgcatctttgatgtgttgttcttggc

SEQ ID NO: 841 - DNA, 546 bp, Homo sapiens
gacacaggcaggtgactactccatccgcgtggacctgcgggctggggacgaggctgtgttcgcccagtacgactccttccacgtagactcggctgcggagtactaccgcctccacttggagggctaccacggcaccgcaggggactccatgagctaccacagcggcagtgtcttctctgcccgtgatcgggaccccaacagcttgctcatctcctgcgctgtctcctaccgaggggcctggtggtacaggaactgccactacgccaacctcaacgggctctacgggagcacagtggaccatcagggagtgagctggtaccactggaagggcttcgagttctcggtgcccttcacggaaatgaagctgagaccaagaaactttcgctccccagcggggggaggctgagctgctgcccacctctctcgcaccccagtatgactgccgagcactgaggggtcgccccgagagaagagccagggtccttcaccacccagccgctggaggaagccttctctgccagcgatctcgcagcactgtgtttacag

SEQ ID NO: 842 - DNA, 399 bp, Homo sapiens
tcacaaacttttatactctttctgtatatacattttttttctttaaaaaacaactatggatcagaatagccacatttagaacactttttgttatcagtcaatatttttagatagttagaacctggtcctaagcctaaaagtgggcttgattctgcagtaaatcttttacaactgcctcgacacacataaacctttttaaaaatagacactccccgaagtcttttgttcgcatggtcacacactgatgcttagatgttccagtaatctaatatggccacagtagtcttgatgaccaaagtcctttttttccatctttagaaaactacatgggaacaaacagatcgaacagttttgaagctactgtgtgtgtgaatgaacactcttgctttattccagaat

SEQ ID NO: 843 - DNA, 543 bp, Homo sapiens
gtggaatgtcatccttacttcaaccagagaaaactgctggatttctgcaagtcaaaagacattgttctggttgcctatagtgctctgggatccctccgagaagaaccatgggtggacccgaactccccggtgctcttggaggacccagtcctttgtgccttggcaaaaaagcacaagcgaaccccagccctgattgccctgcgctaccagctacagcgtggggttgtggtcctggccaagagctacaatgagcagcgcatcagacagaacgtgcaggtgtttgaattccagttgacttcagaggagatgaaagccatagatggcctaaacagaaatgtgcgatatttgacccttgatatttttgctggcccccctaattatccgatctctgatgaatattaacatggagggcattgcatgaggtctgccagaaggccctgcgtgtggatggtgacacagaggatggctctatgctggtgaatattaacatggagggcattgcatgaggtctgccagaaggccctgcgttgtggatggtgacac

SEQ ID NO: 844 - DNA, 496 bp, Homo sapiens
ccccgattcagtcccggattgtgggaggctgggagtgtgagcagcattcccagccctggcaggcggctctgtaccatttcagcactttccagtgtgggggcatcctggtgcaccgccagtgggtgctcacagctgctcattgcatcagcgatgtgaaggtcgtggagttgcccacccaggaacccgaagtggggagcacctgtttggcttccggctggggcagcatcgaaccagagaatttctcatttccagatgatctccagtgtgtggacctcaaaatcctgcctaatgatgagtgcaaaaaagcccacgtccagaaggtgacagacttcatgctgtgtgtcggacacctggaaggtggcaaagacacctgtgtgggtgattcagggggcccgctgatgtgtgatggtgtgctccaaggtgtcacatcatggggctacgtcccttgtggcacccccaataagccttctgtcgccgtcagagtgctgtcttatgt

SEQ ID NO: 845 - DNA, 330 bp, Homo sapiens
gcttctccttgccagagctattatgttcaagctcctgcaagtggctcaacctcccagtactgtgtcactgacccatgctctgctccctgttccaccagctactgctgtctggctccccggaccttcggggtgagtcccctgagacgctggattcagcggccccagaactgcaacacaggatcatctggctgctgtgagaattcgggaagctctgggtgctgtggttctgggggctgtggctgcagctgtggatgtggcagctctgggtgctgctgtttgggaattatccccatgaagtcccgaagtcctgcgttgctgtgaccatgaaga

SEQ ID NO: 846 - DNA, 453 bp, Homo sapiens
sgatgaaatctcactgctaatgctcagagatcttttttcactgtaagaggtaacctttaacaatatgggtattacctttgtctcttcataccggttttatgacaaaggtctattgaatttatttgtttgtaagtttctactcccatcaaagcagctttctaagttattgccttggttattatggatgatagttatagcccttataatgccttaactaaggaagaaaagatgttattctgagtttgttttaatacatatatgaacatatagttttattcaattaaaccaaagaagaggtcagcagggagatactaacctttggaaatgattagctggctctgttttttggttaaataagagtctttaatcctttctccatcaagagttacttaccaagggcaggggaagggggatatagaggtcacaaggaaataaaaatcatctttcatcttt

SEQ ID NO: 847 - DNA, 152 bp, Homo sapiens
  misc_feature (53)..(53): n is a, c, g, or t
  misc_feature (87)..(87): n is a, c, g, or t
  misc_feature (100)..(100): n is a, c, g, or t
  misc_feature (110)..(110): n is a, c, g, or t
caccctgaactcctatgttaccaatgtgtatcgtctccctctccctaaagtgnacttaatctttgctttcttttgcacaatgtcttnggttgcaagtcanaagcctgagncaaataaaattccagtaatttcgaagaatgtggtgttggtgc

SEQ ID NO: 848 - DNA, 383 bp, Homo sapiens
  misc_feature (112)..(113): n is a, c, g, or t
  misc_feature (267)..(267): n is a, c, g, or t
cttgactgaagatattttgctagggaagtgaaactttaaaattttgtagattttaaaaaatattgttgaatggtgtcatgcaaaggatttatatagtgtgctcccactaacnntgtacagatcaggacacatatttttagacatctaagtctgtagcttaaatggaggttactcttccatcatctagaattgtttacttagtaattgttgtttcttttattattatagacttactatcagttttattttgccaagtatgcaacaggnatatcactagtatatgaaaatgtaaatatcacttgtgtactcaaacaaaagttggtcttaagcttccaccttgagcagccttggaaacctaacctgcctcttttagcataatcaca

SEQ ID NO: 849 - DNA, 506 bp, Homo sapiens
tttgccttcagtaatccccttaaggagaaaatatatggacctgatttcagccttcagaatctccaaaagaggagtcatcaattcatagagcacactagggtgttaggagagagctttgcatactctgagaggctacttggaaaggcattttcccaggagagctctgtcaggtggctgcgcttcagccccacccctacaccacagggtctccttgggtatgttcttgggcaagcaatcacaaagccagagaagctgtaagctgcctgccgggcctgaggagctccaaccagggaagactggatgtgaggagaggagtcactgtcaccaggtcacagactgactgaggtgatggtaggatgaggaggaacagatgcccttctttaattggttctcagttaacttctcagaggctctggagaacgggacagtggctttctagcctctgaatgttccaaataaaattttttggtcttggcccctgtactgttttacctctaaattctggc

SEQ ID NO: 850 - DNA, 244 bp, Homo sapiens
ccgcgcgtgtggacgggtccaaatgcaagtgctcccggaagggacccaagatccgctacagcgacgtgaagaagctggaaatgaagccaaagtacccgcactgcgaggagaagatggttatcatcaccaccaagagcgtgtccaggtaccgaggtcaggagcactgcctgcaccccaagctgcagagcaccaagcgcttcatcaagtggtacaacgcctggaacgagaagcgcagggtctacga

SEQ ID NO: 851 - DNA, 538 bp, Homo sapiens
atctatccgtaccaaatgatgttgaataattacatatctttcttgactatactgatttcttattttggtcactattactaaatctctgttaatattctctcttttaactgaaaagggatgggatagaagggtttgcaatgccatattattggtggagggctgttttaacatctttgaagtatggcttgctgaatatctttaccaacatcttgaatatatattctagtgtccacaagatttagcaaaaagataaagcttgggtggaatatcattttaaaatgttcatgttctgttctatattttcttcacctactctccaaatattgtaatgcaaaaagtctcagtaatgatttggtagtattaattttgtggtcattgtttctcttcgataaatttattttcattaaatacttgttagagggttttgaaatgtttttcaaatatgtgaaatgtgaaactgctgtcttttatattaaagtaattaaagaaaatgtattgtgattgaaattattttggcctccacaagatggctctatga

SEQ ID NO: 852 - DNA, 554 bp, Homo sapiens
caccaagactaatctcagccaaacctgctgcttggtggtgccagccccttgtccaccttctcttgaggccacagaactccctggggctggggcctctttctctggcctcccctgtgcacctggggggtcctggcccctgtgatgctcccccatccccacccacttctacatccatccacaccccagggtgagctggagctccaggctggccaggctgaacctcgcacacacgcagagttctgctccctgaggggggcccgggaggggctccagcaggaggccgtgggtgccattcgggggaaagtgggggaacgacacacacttcacctgcaagggccgacaacgcaggggacaccgtgccggcttcagacactcccagcgcccactcttacaggcccaggactggagctttctctggccaagtttcaggccaatgatccccgcatggtgttgggggtgctggtgtgtcttggtgcctggacttgagtctcaccctacagatgagaggtggctgaggcaccagggctaagcaattaaaccagttaagtctccca

SEQ ID NO: 853 - DNA, 549 bp, Homo sapiens
tcacctcggcgtactatcgtggtgcagtgggggccctcctggtgtttgacctaaccaagcaccagacctatgctgtggtggagcgatggctgaaggagctctatgaccatgctgaagccacgatcgtcgtcatgctcgtgggtaacaaaagtgacctcagccaggcccgggaagtgcccactgaggaggcccgaatgttcgctgaaaacaatggactgctcttcctggagacctcagccctggactctaccaatgttgagctagcctttgagactgtcctgaaagaaatctttgcgaaggtgtccaagcagagacagaacagcatccggaccaatgccatcactctgggcagtgccaggctggacaggagcctggcctggggagaagagggcctgttgcatcagcctctgaccttggccagcaccacctgcccccactggctttttgtgccccttgtccccacttcagccccaggacctttccttgccctttggttccagatatcagactgttccctgttcacagcaccctcagggtcttaaggtcttc

SEQ ID NO: 854 - DNA, 554 bp, Homo sapiens
ggcagctgaactcgggtagtccagtggcctagctggtaccacatctattcccatccagagacattctctggcaagtgttctcagctgaaaagtggttggggatgattcttaccttggtaattaaatgaagctacacatttgggtaatctagcaaatgaagtattttttccctcttggcaacttgtgtcagagttactctggtctgagtcaactttcgctggggaaaacctatggaacctactgcaaaaagattgtccaaaatgcctaagaaaatactcctctgatgcatttagccttcaaccctacctgtcttgctgaagggagaaaaatgttttagtacattataggcccagcagcttttattcatgtccaccagctagttgcacagagaatcatgtgtacctaactaaggatgatctaggataagtaactcctgttttatattgagtattttagggaagtctttaaaagacttgttttatatctataaatctaggttattacaaatacaagaattttgtaccttaaataagcctcatttctatttcttcttc

SEQ ID NO: 855 - DNA, 542 bp, Homo sapiens
atccagctagattgcagtttaataattaaactgtacatactgtgcatataatgaatttttatcttatgtaaattatttttagaacacaagttgggaaatgtggcttctgttcatttcgtttaattaaagctacctcctaaactatagtggctgccagtagcagactgttaaattgtggtttatatactttttgcattgtaaatagtctttgttgtacattgtcagtgtaataaaaacagaatctttgtatatcaaaatcatgtagtttgtataaaatgtgggaaggatttatttacagtgtgttgtaattttgtaaggccaactatttacaagttttaaaaattgctatcatgtatatttacacatctgataaatattaaatcataacttggtaagaaactcctaattaaaaggttttttccaaaattcaggttattgaaaatttttcattttattcatttaaaaactagaataacagatatataaaagtgttaatctttgtgctatatggtatgaaatacaatattgtactcagtgttttg

SEQ ID NO: 856 - DNA, 320 bp, Homo sapiens
ggatctctttattgcacagactgaatggctttacatgtttctaatgtgaattaggcatgtgaagcagtgggtgtccacccgtgtccctcatgggtgagccctccagctgtgagcccaggcagtgtggtcaccgagtgaggaccctcctcaccaggaaccgcatccctgtgctgcctccacctgagagttgctagggggttcttgtcgagatcatgtcatcagcacccctaagtcaagtcacgggtttccatagccaggcagttggtatgtacaattcagttcagcgtatgaacttgtatctctaatctgatgtccatttt

SEQ ID NO: 857 - DNA, 501 bp, Homo sapiens
atttgttgaagcctactgcatgccagcccactgctcatccacgtggtctgccatgcctacgaggaaggccagcgcatgcaggactggtctctaatgctgtggtcattgcacagaagggaaaggtctcaaggaagagtcaactgggacaagcacaagcccaccggacatggccttggtaaaggttagcagactggtgtgtgtggatctgcagtgcttcactggaaataatttattcattgcagatactttttaggtggcattttattcatttcctgtgctttaaataaacaaatgtaccaaaaaacaagtatcaagctgtttaagtgcttcggctacttgtcccctggttcagtagaggccccggtttcccagttgttgactgtgacaggctcagcatgggctcagcagatgctgtcttaatttgtggatgatacagaaagccaggctttgggatacaagttctttcctcttcatttgatgccgtgcactgtgtgaagcaga

SEQ ID NO: 858 - DNA, 531 bp, Homo sapiens
aatgtttaattgtttggatctgcacagtttggtttttgcacaaaagtcatttaaaaaaatctgagtaattgtcaaatattaaaagaaagatattcttcctgtaaggaatacagtttttagtcaaagtggccattacatcctctttttaatttacataatacagatacttgagaaagttgttgtggtgttgtatgccaagaaaattctttttattggtgcctatattgtaacaattatttttaatgcattgtattttgaagtaacggttcagttaaatttttcacctgctgtgtaactgaagcacaattacagtttataatcatctgtagaagtctggagataattttgcaactcatgttatgggttaaatgaatatttttgtaaaagtaaaagcaacaaatttataaattgattatttgaaactttacaacacaattgcatcccaaatacaaattgtattgcttattcattatagctattcgtcctgtaatctgtttctaggtgaagcatactccagtgttttaggggttt

SEQ ID NO: 859 - DNA, 493 bp, Homo sapiens
ggcagcccacaagtttctcgtggggagatggaggcagagcccagggtaggggacagagctgctggggcctttccttgcctgggaatctgtcccaggaagagcttccccactcccatcccccaaattggaaaaaccgtacattcaagcctgtttggccctgaaattcttaagaatctggttaagaattaactcactaatgtcaaaagtcaaaacctcctaggggttgtcctgggagtcaggttcacgggtacagaagatgaatctcagatgtcactcaacctgagccgtcattctctgtggcagggctgccctgggtttctcttactcaatccctggagtgtaagcatttggattgtgtcacagattacctttttaccttttctttctttttttttctttttttcaatatcagtgcccacaccttactgagtattgagttttagagctttcgcttgatgtgcttgaccaagagacttcttttgtatccttttct

SEQ ID NO: 860 - DNA, 527 bp, Homo sapiens
ttcacgggccgacgactgagtggaactgaggcccacgtactggggctggtgaatcacgctgtggcccagaacgaggagggggacgccgcctaccagcgggcacgagcactggcccaggagatcctgccccaggcccccattgccgtgcggctgggcaaagtagccattaaccgaggaacggaggtggacattgcatctgggatggccattgaagggatgtgctatgcccagaatattccaacccgggaccggctagagggcatggcagccttcagggagaagcggactcccaaatttgttggcaaatgacccccattttaaccttcagcatgggagatgcatgccctgaagagcaggatccagaaggaagatttgtggccagattgccttcatcatttcacctctccagacttccatttcttcacaaggatgatgatggaaataaaatgactggcgtgatgcctggaaccaaggtgctgatcctaccacctactgctaccttccttagcttcaccctggctagaaat

SEQ ID NO: 861 - DNA, 464 bp, Homo sapiens
atgtaccttattagagcaccagaactaatttgctaagtcttttgtttagtcctgcaagactgatgcttaatacacagtctgttctcctgtgtctaggtcaggaactccagtttgcttttctgttttgtgtcctggtagcagctgttgagtaactttcattggaggttgggaaggaagtgaggagaaagtgttcttgtttagtgttttatttcctataataggatgctgcctaacccagttcatctctatgtcctgttcactgaatattccgggtaattgaaagaaaatataatggatgggctccattaaaaccagctcaaaaataaattcttgtcagtaaagatttcttgtcaagatgtcttggattgcacttttgttgaggaaagacagtgtaaatagttaaagaatgttgataaaattgaaacatttggttgtggaattgtgtgtggttttagagggtttct

SEQ ID NO: 862 - DNA, 548 bp, Homo sapiens
tgcattactatgacccttccaaagaagagaacaggccagtgggtgggttttctcttcgtggttcactcgtgtctgctctggaagataatggcgttcccactggggttaaagggaatgtccagggaaacctcttcaaagtgattactaaggatgacacacactattacattcaggccagcagcaaggctgagcgagccgagtggattgaagctatcaaaaagctaacatgacaaggacctgagggaaccaggattcctccctcctaccagatgacacagacaagagttcctggagaatgggagtgttaagacttttgacttctttgtaagttttgtactgctttggagagtgaatgctgccaagagttcctcagattacaaacagcagtggtgccatttccttccccatcttcatgttacaaacctggaaaggctagaacagccattaggcgtcagcatcttgacttttccccagcatcacaaacagccatttcctcgggcaccaaagtaggttccctttgttggaacaattacactggccatgccata

SEQ ID NO: 863 - DNA, 505 bp, Homo sapiens
cgtaggggtgctgaggttgcccaggggtcctgacaacaccagaggatttcatggccatgagaggagcagggcctgtgtataaataccttctatttttaatacaagctccactgaaaaccaccttcgttttcaaggttctgacaaacacctggcatgacagaatggaattcgttcccctttgagagattttttattcatgtagacctcttaatttatctatctgtaatatacataaatcggtacgccatggtttgaagaccaccttctagttcaggactcctgttcttcccagcatggccactattttgatgatggctgatgtgtgtgagtgtgatggccctgaagggctgtaggacggaggttccctgggggaagtctgttctttggtatggaatttttctctcttctttggtatggaatttttcccttcagtgactgagctgtcctcgataggccatgcaagggcttcctgagagttcaggaaagttctcttgtgcaacagcaa

SEQ ID NO: 864 - DNA, 554 bp, Homo sapiens
gagacagcaacagccgtagcaaaagcagctgctgctcctgctatgagggtgtatatattttttacccaaagctctggaattgtacatttattttttaaaactcaaagagggaaagagccttgtatcatatgtgaacattgtatcataggtaatgttgtacagacccttttatacagtgatctgtcttgttcctgcagcaaaaatcctctatggacataggaggtgctgtgtcccatgccttcttgccctgacagtgtcccatgggcccccttctgctccctgccccctccctgctactgctgatgcactgtcctctccctgcagcccctggcttcccagccttcctcctgaccccttccaacagccttggaactccagctgccaccaccctctgggtcggacactgggacccactggcccagtcttggctgctgcttacccctagccttgatgcctgcccagggacccccagccccctcccgttgccctgcagctttaacagagtgaaccatgtgtattgtacaggcgcggttgtcattgcagaaaccgctggg

SEQ ID NO: 865 - DNA, 498 bp, Homo sapiens
cttcctgcagcacgtggtgctggcggcctgcgccctcctctgcattctcagcattatgctgctgccggagaccaagcgcaagctcctgcccgaggtgctccgggacggggagctgtgtcgccggccttccctgctgcggcagccaccccctacccgctgtgaccacgtcccgctgcttgccacccccaaccctgccctctgagcggcctctgagtaccctggcgggaggctggcccacacagaaaggtggcaagaagatcgggaagactgagtagggaaggcagggctgcccagaagtctcagaggcacctcacgccagccatcgcggagagctcagagggccgtccccaccctgcctcctccctgctgctttgcattcacttccttggccagagtcaggggacagggagggagctccacactgtaaccactgggtctgggctccatcctgcgcccaaagacatccacccagacctcattatttcttgctctatcatt

SEQ ID NO: 866 - DNA, 461 bp, Homo sapiens
tgtcctcatctctgcaaagttcagcttccttccccaggtctctgtgcactctgtcttggatgctctggggagctcatgggtggaggagtctccaccagagggaggctcaggggactggttgggccagggatgaatatttgagggataaaaattgtgtaagagccaaagaattggtagtagggggagaacagagaggagctgggctatgggaaatgatttgaataatggagctgggaatatggctggatatctggtactaaaaaagggtctttaagaacctacttcctaatctcttccccaatccaaaccatagctgtctgtccagtgctctcttcctgcctccagctctgccccaggctcctcctagactctgtccctgggctagggcaggggaggagggagagcagggttgggggagaggctgaggagagtgtgacatgtggggagaggaccagctgggt

SEQ ID NO: 867 - DNA, 398 bp, Homo sapiens
aaaccggaggtatcttcaaaggcatggagacctggttccagtaaatgtcccaccagtggggtatagaaagcatgctcatgaccctgccgtgtcgtctgaggtacccgttcttatcctagtggttcaggaagagaaaacgcagtttgcactttcaagacagcttctctaaggctggcatgttatctccttgctttgctttttgccgttttaaaatgtgtaattgttccagcattccaatggtcttgtgcatagcaggggactgtaaccaaaaataaacatgtatttgtgtaattggtttgaagaagtcttgaatagctctttactgtcttacttggggttgataagatttgagtgtttgcaattttttactaaatgtagctccaagtcttaaatggctt

SEQ ID NO: 868 - DNA, 489 bp, Homo sapiens
gaatttctgctggactttatctgggcagaggaaggatggaatgaaggtagaaaaggcagaattacagctgagcggggacaacaaagagttcttctctgggaaaagttttgtcttagagcaaggatggaaaatggggacaacaaaggaaaagcaaagtgtgacccttgggtttggacagcccagaggcccagctccccagtataagccatacaggccagggacccacaggagagtggattagagcacaagtctggcctcactgagtggacaagagctgatgggcctcatcagggtgacattcaccccagggcagcctgaccactcttggcccctcaggcattatcccatttggaatgtgaatgtggtggcaaagtgggcagaggaccccacctgggaacctttttccctcagttagtggggagactagcacctaggtacccacatgggtatttatatctgaaccagacagacgcttgaatcaggcactat

SEQ ID NO: 869 - DNA, 495 bp, Homo sapiens
gtatttcattctcgtatggtgctagagttagattaatctgcattttaaaaaactgaattggaatagaattggtaagttgcaaagactttttgaaaataattaaattatcatatcttccattcctgttattggagatgaaaataaaaagcaacttatgaaagtagacattcagatccagccattactaacctattccttttttggggaaatctgagcctagctcagaaaaacataaagcaccttgaaaaagacttggcagcttcctgataaagcgtgctgtgctgtgcagtaggaacacatcctatttattgtgatgttgtggttttattatcttaaactctgttccatacacttgtataaatacatggatatttttatgtacagaagtatgtctcttaaccagttcacttattgtactctggcaatttaaaagaaaatcagtaaaatattttgcttgtaaaatgcttaatatcgtgcctaggttatgtggtgact

SEQ ID NO: 870 - DNA, 517 bp, Homo sapiens
catagctccccatagtcaggtgtaccagccagccaaaccaacaccacttcctagaaaaagatcagaagctagtcctcatgaaaacacaaatcataaatccccccacaaaaattccatatctctgaaagagcaagaagaaagcttaggcagccctgtccaccattccccatttgatgctcagacaactggagatgggactgaggatccatccttaacagctttaaggatgagaatggcaaagctgggaaaaaaggtgatctaagagttgtaccacctatataaacatcctttgaagaagaaactaagaagcatttgcaaatttctcttctggatattttgtttatttttttcttaagtccaaaaattatcattacagtgtaccatattaagccatgtgaataagtagtagtcattatttgtgaaaaattcccaaaagctggggaaaacaatgtgtaacttttccagttacttgacacgattcagtgggggaaaaccagcattttttattctattgata

SEQ ID NO: 871 - DNA, 519 bp, Homo sapiens
tgtctacacacgttgcaggggcatactaatagagtctattcattacagtttgatggtatccatgtggtgagtggatctcttgatacatcaatccgtgtttgggatgtggagacagggaattgcattcacacgttaacagggcaccagtcgttaacaagtggaatggaactcaaagacaatattcttgtctctgggaatgcagattctacagttaaaatctgggatatcaaaacaggacagtgtttacaaacattgcaaggtcccaacaagcatcagagtgctgtgacctgtttacagttcaacaagaactttgtaattaccagctcagatgatggaactgtaaaactatgggacttgaaaacgggtgaatttattcgaaacctagtcacattggagagtggggggagtgggggagttgtgtggcggatcagagcctcaaacacaaagctggtgtgtgcagttgggagtcggaatgggactgaagaaaccaagctgctggtgctggactttgatgtggac

SEQ ID NO: 872 - DNA, 372 bp, Homo sapiens
caccaagacgactgcttcagcttcttctcttatccttactttctttaatagatatttattaaactgtccagtgaaaaggtgccacaatgcccagtattgtaaacaacaggtttgcattcatgaagctttcattcattctggagtctactaatttacctgaatggtgtttgcattctgtgaaatgcctctccacgttgcatatgtcacacttttgtctgcacataactcttttttcacaagaagggtcactgccacaacagcacagtcagcgggtgaattacaggtgcctgctgcctgcctacctgggtaatctgatcttgtctgtatcgccgtgtgctcatcactgaagaattgcaggccactcatgtcagt

SEQ ID NO: 873 - DNA, 486 bp, Homo sapiens
ctggagaagcactgccattcagcctcctgctccagctgttcacatgcagaaatgctctcttcacaggcagagaagcctgtggctaaagtttccacatcccattaactcagtgcttttgtctttttcatgacatggcacatagagaaaatatttttttctagcacacaagagcaacctgaaaggctgctcctggctaggggactctgtcccgggggaccgtgtcctcccccatgtcctgcctaggccctcagaggaccaggggatcatgtctccaggtaacccgactgtagcccctgctggctgagctccagcctgtgcccactgataatagcagggacggcctttctcttagagcagctgataagtttccctacctgatggccccctctgacataaactgcacacctggggtgatggcttaaagccagaaagagctgagggagttaagagggccaaccttagggcacgtgggcattattaaaggtc

SEQ ID NO: 874 - DNA, 532 bp, Homo sapiens
gagacagacttggcaagggaccccctggttctgagccagtagctgccatctggaaattcctcttttagcctctccttagaggtgaatgtgaatgaagcctcccaggcacccgctgaatttctgaggccttgcttaaagctcagaagtggtttaggcatttggaaaatctggttcacatcataaagaacttgatttgaaatgttttctatagaaacaagtgctaagtgtaccgtattatacttgatgttggtcatttctcagtcctatttctcagttctattattttagaacctagtcagttctttaagattataactggtcctacattaaaataatgcttctcgatgtcagattttacctgtttgctgctgagaacatctctgcctaatttaccaaagccagaccttcagttcaacatgcttccttagcttttcatagttgtctgacatttccatgaaaacaaaggaaccaactttgttttaaccaaactttgtttggttacagttttcaggggagcgtttcttccatgaca

SEQ ID NO: 875 - DNA, 498 bp, Homo sapiens
caccaagccgacctcagagttgttcatcttccttatgggacaaaaccggttgaccagaaaatgggcagagagagatgacctcggaagcatttccacagatggtgtcagggtttcaagaagtcttagggcttccaggggtcccctggaagctttagaatatttatgggtttttttttcaaatatcaattatatggtagattgaggattttttttctgtagctcaaaggtggagggagtttattagttaaccaaatatcgttgagaggaatttaaaatactgttactaccaaagatttttattaataaaggcttatattttggtaacacttctctatatttttactcacaggaatgtcactgttggacaattattttaaaagtgtataaaaccaagtctcataaatgatatgagtgatctaaatttgcagcaatgatactaaacaactctctgaaatttctcaagcaccaagagaaacatcattttagcaaaggccagga

SEQ ID NO: 876 - DNA, 547 bp, Homo sapiens
gccatcactcttttttgtgaggagcctaaatacattcttcctggggtccagagtccccattcaaggcagtcaagttaagacactaacttggccctttcctgatggaaatatttcctccatagcagaagttgtgttctgacaagactgagagagttacatgttgggaaaaaaaagaacgcattaacttagtagaactgaaccaggagcattaagttctgaaattttgaatcatctctgaaatgaagcaggtgtctcctgccctctcatcaatccgtctgggtgccagaactcaaggttcagtggacacatccccctgttagagaccctcatgggctaggacttttcatctaggatagattcaagacctttacctcagaattatgtaaactgtgattgtgttttagaaaaattattatttgctaaaaccatttaagtctttgtatatgtgtaaatgatcacaaaaatgtattttataaaatgttctgtacaataaagttacacctcaaagtgtactcttggaatggattctttcctgtaaagtcttatc

SEQ ID NO: 877 - DNA, 342 bp, Homo sapiens
  misc_feature (163)..(163): n is a, c, g, or t
tgccgtcagccgaactttgttatggagggagcagcctcacacaagcagaaacactcctgtggatggtattgtagcatgtattgtttattttagtcaatagaccctctccttataaatggtgtttagtcttcctgttgcatttcatgggcctgggggtttcctngcagaggatattggagcccctttttgtgacattaccaattacatctttgtccacgtttaatactttgttttggaaaatttaaatgctgcagatttgtgtagagttctaataccaaagacagaagtaaatgttttccatatactttgtcttgcctgtatgcagcccttgtgtaatatggt

SEQ ID NO: 878 - DNA, 400 bp, Homo sapiens
tgtttttatttgtaccgtccacttgtgccttactgtatcctgtgtcatgtccaatcagttgtaaacaatggcatctttgaacagtgtgatgagaataggaatgtggtgttttaaagcagtgttgcattttaatcagtaatctacctggtggatttgtttttaaccaaaaagatgaattatcaatgatttgtaattatatcggttgatcttttttgaaaagatgaaccaaaggatttgactgctaatattttattccttacactttttttctgaataagtctctcataatgagtgcagtgtcagactgtgcctactctgatggtatgtgccatttgtaaaataaaatagagcagaaaaacacaaaaagagaacactggttcagacattcagtgggcaagta

SEQ ID NO: 879 - DNA, 509 bp, Homo sapiens
gcccctcaccaatgcatatgaagagtatgcttggggaagagcttaggaatggggtgggcatgggactgctgggtagcagcctttgagcaaatctgcatcttctcttatttctgacctttttccacgtgcccagtcctatttctgccagttgaaggcatactaatattctttatactatttaatcttttgcagaaaccttactattataacttgctactctccagataccaattcttcatgccgagagcatcggaaatgtttttgtgtcttactgatgttttcatgatcaacttgtaaatgtaagcagttgacttcataaaaggtattttaactattcttggagtcctttgctacccaagcacctggtttcaccatgcgatcactgacttctctacagtgaagactctttcttaatataggatttcgctgtgctcttttgattaaaaatatctaaccttaaaagacgtaaaaatgtatctgtgaaatctcactttgttagcgttgctgct

SEQ ID NO: 880 - DNA, 371 bp, Homo sapiens
ttctctgttctcctggaagtccagggaagaaggagggccccagccttaaatttagtaatctgccttagccttgggaggtctgggaagggctggaaatcactggggacaggaaaccacttccttttgccaaatcagatcccgtccaaagtgcctcccatgcctaccaccatcatcacatcccccagcaagccagccacctgcccagccgggcctgggatgggccaccacaccactggatattcctgggagtcactgctgacaccatctctcccagcagtcttggggtctgggtgggaaacattggtctctaccaggatccctgccccacctctccccaattaagtgccttcacacagcactggtttaatgtt

SEQ ID NO: 881 - DNA, 317 bp, Homo sapiens
aaatgttgctaagtcctggtatgatggtgtgagcttccttggggaagtacttcttgagttatgtaactaacaggatgttttactacagatctggatggctattcagataacatggcaaaaaatgatagcagaagatcattaaaaacttaaaatatattttattagaaaacatttatctatgaatgaatatttccttgatgctggtctctgcacacatatgcttggttacttgcatgcattcattggttgttcaataagtgagatgattacagataatactgtattttccttatatggaaaaccgttatagacccaat

SEQ ID NO: 882 - DNA, 534 bp, Homo sapiens
tatattcatcttttcagggtaaatttgtttttctgagtttctcgtaatgctcatttttacatgctgctactagcttttttttttaaaaaaagtaaaagttgctgctttctaaaatattaattgccttatatttgaaagtgccattgcaatcgtaagtagactatgtatttcctataatgatgtctgatatttaaataggaaatcagacaaacaatattcagaaagtttaagcatataaactttttatttttaacttgcctagatccctgtattccaaaacctgctgcatcataataaatatatctatatatatttagcataagacgtgatatttttaatttcttttttaaaaaattatatttgtctcttagagttaaaattttctttatataatattgtcatatgtcatagttttaatacaattcacatgatttctatgtttcttaatgatattttgttgtgtaaaattgatcggattgattaaaaaacaaattctctggaatttgtgcgttcatgctttttcgtattctttat

SEQ ID NO: 883 - DNA, 500 bp, Homo sapiens
gatgcatgtatcatacgtgctttaagcaagtcatgtggccaagcctagcatcatggagccagaaagtatagccttgctgtctgtctacatcatgatgtataaattgatatatctacatgaattatagaaacttagaagtgatctttattcagtcttataatttttacatgaagaatcttaggcctaggaggagaaaatgattttctttctattacctaactagattggggcatatttctgataaagacccacctctagtgagattcatcttttttgtttgtgtgactatattccatagagaagaaagatgggatagctcaacttcattatataccaaagcaaaacacatgccaaatgatgactacattttaccaacatatttagacgagtattcttgactagtgtttactatctatacccccaaaactactactatatagacagaatggaaagtatttctatttgtcctttttttgttttctgttctaattgtcagggac

SEQ ID NO: 884 - DNA, 491 bp, Homo sapiens
gaggaggaactgacgcagctacgccacgaactggagcggcagaacaatgaataccaagtgctgctgggcatcaaaacccacctggagaaggaaatcaccacgtaccgacggctcctggagggagagagtgaagggacacgggaagaatcaaagtcgagcatgaaagtgtctgcaactccaaagatcaaggccataacccaggagaccatcaacggaagattagttctttgtcaagtgaatgaaatccaaaagcacgcatgagaccaatgaaagtttccgcctgttgtaaagtctattttcccccaaggaaagtccttgcacagacaccagtgagtgagttctaaaagatacccttggaattatcagactcagaaacttttatttttttttttctgtaacagtctcaccagacttctcataatgctcttaatatattgcacttttctaatcaaagtgcgagtttatgagggtaaagctctactttcctactg

SEQ ID NO: 885 - DNA, 493 bp, Homo sapiens
cccccatgttacctggactggaacagactgtgaatatagcagaaggttccaagaactctggtgtctgacctagaagaggcacagttctctctactggaaagaaaacgatgtagccgattgcacaagggtgccaagggaagacccaggatggcccatcaaaggaacctgggggaggatgcaggaggctgaagggatgcacctggcatttctctcactgtgctcttaccgcatcagcaacccccaacttttgggcctactctgccccccatgcgtgaataccctgcttggatgctgtgcttttccggtttgtctctaagcccctttctccagggcatgttggtttccctggcctctcagtgtcctaactggagcccagagtgccttgttctgagccaggagacggctgagcactggccctccacacctaagcgtcctttacattaacttattggtcttgtataacacctggtgccattgccaagtggctgtgtcc

SEQ ID NO: 886 - DNA, 518 bp, Homo sapiens
gacaacaatgaagtagcccctgaacagcatggagttgctgtgagtttgttcgttgcagacctttgtgttgggtcctgggaatctgagctttgttccctgtgcatggtggataattgaaaccaagaggacatgggatagaccttgtgacagaccaattctgtgacccctgtcttctgggtcacattattcattgttgatttaaatacaggactaccaaacagtacaaatctatcatgagtctggtagaaaagtaaaagtaaaagctgcacacgttacatactgtttattgttctaatgtacaactaactatttgcatataatgtgatttaatttattgctgttttgtgtagaaaaggagaactaatgactgtggatataacccatgttttgtataatatattttatttcttgtgcgaactggtcatttaaaatatctacttcatttgatgtttggatataaatgtgtatgtgtccttgtaaatgtttctatcaagcaagaatgccacgtactcagagta

SEQ ID NO: 887 - DNA, 533 bp, Homo sapiens
gctcctggcaattagctggactccatgacccacccctggtgcagcatagatccgacgtctgtctgggcgaagggtaggggtgggtaggggcgggaagcctgagtgcaaatgtcatttccctctactgcctcttcctgcctctccccaccctgcccacatccacagaggggagagaagggtcatagctaaatgcaacaaagtctgtatcttgtcccaacctgcttttctgttctgttagcatatcataaagtaagcctttctggtgaaggaaggttgctatgaaactttttttcttggtggaaatggccaagtttaggcactctgctttttgccttacactaatgcttagaaagctgtcttttcagtggtgttgcagcccccagatgtgtggccaacctctgctgcaaaggaatctcttgctgagtccaggccaccaatcaggcaaatagcccatacatttgatcgttgtaaaccatgaagtcttttcttgcaagacgtttttcttctgctgtggtatcttgcccttaaaaatt

SEQ ID NO: 888 - DNA, 516 bp, Homo sapiens
tggtcacagcgctagtcattcatttttgagaagttgcttcttttacatcagaaaaccagtcaatcatatggagacttcttttgtgatgaaaaagggctttagaagttaaatacatgcatgcacatgaaaacatgcacaaccacagcctcaatcttgtatttagtttggggaaagagaagagaatttcctgtggattattttttcctcaagtgcacctctctggctaacccaactctgcaagaaagcactgtgactaaaacatacataacgcctgcataaatattccatggtttcagttaaatttcagtttttagcctttacacatgaggtcaaggagtgacgaaaatacaagcaggaaaaaatgaaatatctggtttttgctgaatgcttaatttattttttactgtgccactccaatatttatcaaatccaatagcatgaatgcttctctgtagtaatactaattttgtgccttttgtctgctttcttaagaccagttgttcacactttgtagat

SEQ ID NO: 889 - DNA, 529 bp, Homo sapiens
cctcccttcctggagggatggccagggaaggagaaaacagagaactgacacctttgaaaccacagaatgtgttacatgcagactcgctcaagggcataagttattgtgaacgtttttgccaatcactgctcaacagccctgctagattttgtatgatgctgaattattatgcagactaattccacccagttgagacacaccatgcttgttcacttgtatttattgaaactgtggattcttgcccgtgctgtcccttgtatttactttaagcactgatcacttatcattcattcggtatggttttccctgtcccttgtacacattctggtatgaatttgtaaaaataacctgctacaaattggttgaatgtttctgtctgtggtgcgaaccagcattaacggatggggcacgtgcccaactgaggaacaggagaagaaatcaccaatttgggctctcagagctaagacacacttattgattctgttgcacattttgcactggtttatggcgattgttttcttggacggat

SEQ ID NO: 890 - DNA, 490 bp, Homo sapiens
tagagacccatgtcatcttaacctaaagggaaatcttattgcgttatcataaaattgatgatatcttagggtcagaattgcccttttttttattttgaatgggaagctctcactaaaacaatcctgagatttcttaatttcatggttctttaaatattataaacacagagtcaacatagaatgaaattgtatttgttaaaatacacacattggaggacaagagcagatgactacttttcgaagtaatgctgctccttcctaaaagtctgttttcaatcctggtaatattaggggcactgcggcacctaagaagccttaaatgagagctaatccaatttagagagcgatggtgtcagcatttcggtctgcatatctgtgtgtccgtatctgcgtttgtgtgcgtgtacgtgtgcccctgtgtgtgggcccagttttcaggcatgtagaataagcatggagtcatattgaggaggactcacttcttgaagat

SEQ ID NO: 891 - DNA, 433 bp, Homo sapiens
  misc_feature (289)..(289): n is a, c, g, or t
tggggaggtgaacctgtcttcatcggactctccctaccactacacgaaggtgacctacagccaggaggacgtggacaagctgctgcacctgacacattacaatgtctgcaacaaccaggagcagctgctggaggctctgcgccaggcagtgcagcggaggcggcagcgcaggccccactgatggccggggcccctgccacccctaactctcattcattccctggctgctgagttgcaggtgggaactgtcatcacgcagtgcttcagagcctcgggctcaggtggcacngtcccagggtccaggctgagggctgggagctcccttgcgcctcagcagtttgcagtggggtaaggaggccaagcccatttgtgtaatcacccaaaaccccccggcctgtgcctgttttcccttctgcgctaccttgagtagttg

SEQ ID NO: 892 - DNA, 399 bp, Homo sapiens
gaactatcacaattataacttaccaacaagaagggaatgcaggtagttgtttaggagatggtacattttttatataacattcacttccttgtgtatttgatagtcttttcatggtttataacattttctcctgtaaagataggctaatttctgaaataataattaaatttatagaaagccgagaggaaattgctagtttattcctggtagaggaatttctgtatttgaaaattctccagaaggaataatataaactgtggactttgggtgataatgatatgtaggttcgtcagttgttaacaaatgtatccctctgttgggggctattgataatggggaaggctgtgcatgtgtgggagtaggaggtgtatgggacatctctgtaccttctaatcaatt

SEQ ID NO: 893 - DNA, 356 bp, Homo sapiens
aattcttcagtcacgctgctttaaaatgggacaaaatctattaagttgaaccatatataattgtggatatttggctgtttttaatctgacaagcagtaacttcatatggtttgccttaatatatatttgttttagtcatgaactcataatccattgatgctctttcatgagaagagatatgacccatatttccttattgatattattggtacaggcagacaaccctggtaggagagatggattctggggtcatgacctttcgtgattatccgcaaatgcaaacagtttcagatctaatggtttaatttagggagtaattatattaatcagagtgttctgttattctcaatctttat

SEQ ID NO: 894 - DNA, 498 bp, Homo sapiens
ggctgagcaccagtgagttctttgcctctactctgaccctagacaacctggggagggaccctgtgcccgcaaaccagacacataggacaaagtttatctataacctggaagaccatgagtggtgtgaaaacatggagtccgttttatagtgactaaaggagggctgaactctgtattagtaatccaagggtcatttttttcttaaaaaaagaaaaaaaggttccaaaaaaaaccaaaactcagtacacacacacaggcacagatgcacacacacgcagacagacacaccgactttgtcctttttctcagcatcagagccagacaggattcagaataaggagagaatgacatcgtgcggcagggtcctggaggccactcgcgcggctgggccacagagtctactttgaaggcacctcatggttttcaggatgctgacagctgcaagcaacaggcactgccaaattcagggaacagtggtggccagcttggaggatggac

SEQ ID NO: 895 - DNA, 453 bp, Homo sapiens
aagcttctactcctgcagtaagcacagatcgcactgcctcaataacttggtattgagcacgtattttgcaaaagctacttttcctagttttcagtattactttcatgttttaaaaatccctttaatttcttgcttgaaaatcccatgaacattaaagagccagaaatattttcctttgttatgtacggatatatatatatatatagtcttccaagatagaagtttactttttcctcttctggttttggaaaatttccagataagacatgtcaccattaattctcaacgactgctctattttgttgtacggtaatagttatcaccttctaaattactatgtaatttactcacttattatgtttattgtcttgtatcctttctctggagtgtaagcacaatgaagacaggaattttgtatatttttaaccaatgcaacatactctcagcacctaa

SEQ ID NO: 896 - DNA, 465 bp, Homo sapiens
atattggtcattgatcttcgttcatgaattagtctacagaaaaaaaatgttctgtaaaattagtctgttgaaaatgttttccaaacaatgttactttgaaaattgagtttatgtttgacctaaatgggctaaaattacattagataaactaaaattctgtccgtgtaactataaattttgtgaatgcattttcctggtgtttgaaaaagaagggggggagaattccaggtgccttaatataaagtttgaagcttcatccaccaaagttaaatagagctatttaaaaatgcactttatttgtactctgtgtggcttttgttttagaattttgttcaaattatagcagaatttaggcaaaaataaaacagacatgtatttttgtttgctgaatggatgaaaccattgcattcttgtacactgatttgaaatgctgtaaatatgtcccaatttgtattgattctcttt

SEQ ID NO: 897 - DNA, 447 bp, Homo sapiens
cctgtctggtcacacgagccagtgtgagtggaggcagaggagtgaggcccacgggcagcgcccaggagcccaccttcccctctggcccagccaccactgcctctcagcttcaacaggtgacaggctgctttcgtgacttgatattggtgtcatagcatttggcctacattaaaagccccaatttcaggggaaaggacaaaatggagagtgactgaggtgctgacctcagggcaaggctggtgaaccctgcagcgggccagctatggtgggaagcctggcatttggggtgctccttgcaacgtcttaagcaagcgacccccctgacatagcaaaaggtggcaacccatggaggcagaaagaaggacgccagcctgacccttatctgaaacgtcctaagcagagttaatcctggctgctcaggagaggcgacacatttcaaatctccac

SEQ ID NO: 898 - DNA, 468 bp, Homo sapiens
aactgtgtatacattcttactgtttgaacaactattgcctttaattaaatgtttcatttttctccagagtccccaaagccacatggcattattatagtcatttttgagatgcctgtagagaatgaaagtattgactccgttagagggaaaatgggtttctctgggtgaattccaacgaagcatacctaggggtaacagtgaacctacctgggtttgttttgttttggtaaggatttatgtagtgtctggctgtaagcaagaatgagtggattataaacttgaagatttctctgttaaagtcacaaaaatgatcgacaaacaatatttttgtgatgtttatttaaacgttgtattttataacatacttcaaggaagagtatcgaagtaagttgctttataaattaagactaaattcgtatggatgcagaattcaattaataaaatttgagcctgttacgtaaattgaat

SEQ ID NO: 899 - DNA, 528 bp, Homo sapiens
agtgttgtgtagcttaatccttctgaagtctttttgtcatgtagctattaatctgtggctatgaaatgatcagaaatgctaagtgagatcaatatttgtttggaaaaaaaatcttgggaaacaacccaagggttttcgctgttgttgtttttctttttctatttttgtttacttagtcctttagctagtggatttaattttgttgtgcctgcttcattttgcaataacaatgcagtagaatttaaaacttggatgcttaagaggcctgcatatagataagaatttcaggcaaaactacatttattgttaataacagcttgttcataggctcttgtattttatgtaactgtgataaataatgaaacttagttatattgaggttattgtttgtcggtgaagtgttagtcacagtattttcaaaagtttgcacatattgttctgtgtaattgtgtaagccataattacagtgtttaattctcttttcctattacatcattcattgaaagtgatcactttaccattttgaaa

SEQ ID NO: 900 - DNA, 483 bp, Homo sapiens
ttgatgtgtccgctgtgtatgttagctgaactttgatgagcaaaatttcctgagcgaaacactccaaagagataggaaaacttgccgcctcttcttttttgtcccttaatcaaactcaaataagcttaaaaaaaatccatggaagatcatggacatgtgaaatgagcatttttttcttttctttttttttttttttttttaacaaagtctgaactgaacagaacaagactttttcctcatacatctccaaattgtttaaacttactttatgagtgtttgtttagaagttcggaccaacagaaaaatgcagtcagatgtcatcttggaattggtttctaaaagagtaaggcatgtccctgcccagaaacttaggaagcatgaaataaatcaaatgtttattttccttcttatttaaaatcatgctaatgcaacagaaatagagggtttgtgccaaatgctatgaacggccctttcttaaagaca

SEQ ID NO: 901 - DNA, 393 bp, Homo sapiens
tgccaggggtggtcccacctaaagatgctagcccctctccaggtgggcataaggagtaacagatggcaaaaccacaaactattttgatggactgtgctgcagtatcaccagaagacattagggggcagtaggcccccacacaaaaccttcaggcttgaattttaaaggggaggactttctgccaacttttcttgtatgccttgggaaagccagttgccctgaacccagcagacaccatggaatgtcctttgcacgcattaaatggtacagaactgaagcctcggaagcaatttggaactcgatcttctcttccttaaatgaaaagttattgaccaaatggactttttaaaagacacaggacccttaactttgccccaaagtgaggggctccac

SEQ ID NO: 902 - DNA, 563 bp, Homo sapiens
tgtttctcaccatatgcttttgttggcattatgcagtaaccattgtcatcgttggaatgaattatgctttcattacctggttggttaaatctagacttaagaggctctgctcctcagaagttggacttctgaaaaatgctgaacgagaacaagaatcagaagaagaaatgtgactttgatgagcttccagtttttctagataaaccttttcttttttacattgttcttggttttgtttctcgatcttttgtttggagaacagctggctaaggatgactctaagtgtactgtttgcatttccaatttggttaaagtatttgaatttaaatattttctttttagctttgaaaatattttgggtgatactttcattttgcacatcatgcacatcatggtattcaggggctagagtgatttttttccagattatctaaagttggatgcccacactatgaaagaaatatttgttttatttgccttatagatatgctcaaggttactgggcttgctactatttgtaactccttgaccatggaattatacttgtttatcttgttgctgca

SEQ ID NO: 903 - DNA, 471 bp, Homo sapiens
aactccctgtggccgacatgagggcactcctgacaggcaaggactgcccccatgtccgggagaagggctccgggaagcagaacaaggacctctatgagttggccttctcaatcagctatgaccgtggggaggaggaagcgtacctcaacttcattgccccctccaagcgggagttctacctgtggacagatgggctcagtgccttgctgggcagtcccatgggcagcgagcagacacggctggacctggagcagctgctgaccatggagaccaagctgcgtctgctggagctggagaacgtgcccatccccgagcggccaccccctgtgcccccaccccccaccaacttcaacttctgctatgactgcagcatcgctgaaccttgacagtgtggctggccatgggccacagctgcggccactgcagcagccatgaagggcagtgggtagaggagtgcaggcaccctgacca

SEQ ID NO: 904 - DNA, 495 bp, Homo sapiens
gcagctctacgacgtgatggacgcggtcccagcgcggcgctggaaggagttcgtgcgcacgctggggctgcgcgaggcagagatcgaagccgtggaggtggagatcggccgcttccgagaccagcagtacgagatgctcaagcgctggcgccagcagcagcccgcgggcctcggagccgtttacgcggccctggagcgcatggggctggacggctgcgtggaagacttgcgcagccgcctgcagcgcggcccgtgacacggcgcccacttgccacctaggcgctctggtggcccttgcagaagccctaagtacggttacttatgcgtgtagacattttatgtcacttattaagccgctggcacggccctgcgtagcagcaccagccggccccacccctgctcgcccctatcgctccagccaaggcgaagaagcacgaacgaatgtcgagagggggtgaagacatttctcaacttctcggccggagtttggctgag

SEQ ID NO: 905 - DNA, 437 bp, Homo sapiens
ctacaaccagatgcatcaccttctaaaactggtacattaacctcaataccagttacaattccagaaaacacctcacagtctcaagtaatagacactgagggtggaaaaaatgcaagcacttcagcaaccagccggtcttattccagtattattttgccggtggttattgctttgattgtaataacactttcagtatttgttctggtgggtttgtaccgaatgtgctggaaggcagatccgggcacaccagaaaatggaaatgatcaacctcagtctgataaagagagcgtgaagcttcttaccgttaagacaatttctcatgagtctggtgagcactctgcacaaggaaaaaccaagaactgacagcttgaggaattctctccacacctaggcaataattacgcttaatcttcagcttctatgcaccaagcgtggaa

SEQ ID NO: 906 - DNA, 434 bp, Homo sapiens
gtctacctggccagtggagtggtccatgctaagtctaacactcctgggagctcaggaggcttctgagcttctcctgtactgtgcatcgtgagggccagagacaggaatgtaaggattggcaactgtgttacctttcaagtttatctcaataaccaggtcatcagggacccattgttctcttcagaaccctatctgggagagaaggcgaaccacctccgggtttccatcatgtcaaggtcacaggcatccatgtgtgcaaaccatctgccccagctgcctccacagactgctgtctccttgtcctcctcggccctgccccacttcagggctgctgtgagatggaattccaggaaagaacttcaggtgtctggaccctttctatctagataatatttttagattcttctgctccctagtgacctacctgggggcaa

SEQ ID NO: 907 - DNA, 551 bp, Homo sapiens
gccgccctgtaggctggggatgggctgctgtgtgaatgttgacgttcgtttcatggagaaaggggaggtgaaagattgaagagcaggttcctgtcaatgttctgagttcgagctggaggtgtagattgaatagtctacatggtctgtgagtgtgtgagatgaacccttccatcctttgacacctggttgtatgtgtaggctaagaaggaaggaccctcctgtcagtgtgcaaagctgtaatctcatggactagaagagagggggccaaggggatggacaggagaagtcatgcagaatctaagcaggaatgcagatagaacacatctaggctcttttccccaggagagtgatgatggagcatatagatctggctcaaattcagcctccatcacttaccagtcaggaaccctggcgatatcactttaactttctgaacctcagagtcttcacctataagacggggaaaataataccaccctttcaagattgttgagataaataagtgatataaaacatgtaaagcttagttctggccacagtgtagctactca

SEQ ID NO: 908 - DNA, 413 bp, Homo sapiens
ccttttcctaagcaccagcggaaggagctgtgccccgggatggagtgagggtggagggcgcgtcagccacgggtgggccttgtgtcgcctcgtatcggcccaggtaggttgttggcctcttacttgggctgacctgacccccgaaagagaaacagacaactctgttctcaggattggggatggacggcttcggccaagcgttttagcctcattcactcaggccccactcagcactctgccagccaagaccattgatttggaaaatccggtccccacccgctaatgagctgttgacactgttgttccttgctgaattggattgttgacttgtagttcagaggcgtacaactagttggcgattagacttgttatgtgatgttaccagcctgaaatgcgatcaccccgtaggaaat

SEQ ID NO: 909 - DNA, 535 bp, Homo sapiens
tatgtagtgtgctttttgtccctttccttctatcaccctacattccagcatcttaccttcatatgcagtaaaagaaagaaagaaaaaaaaaggaaaaaaaaaaaaaaaccaatgttttgcagtttttttcattgccaaaaactaaatggtgctttatatttagattggaaagaatttcatatgcaaagcatattaaagagaaagcccgctttagtcaatacttttttgtaaatggcaatgcagaatattttgttattggccttttctattcctgtaatgaaagctgtttgtcgtaacttgaaattttatcttttactatgggagtcactatttattattgcttatgtgccctgttcaaaacagaggcacttaatttgatcttttatttttctttgtttttatttttttttttatttagatgaccaaaggtcattacaacctggctttttattgtatttgtttctggtctttgttaagttctattggaaaaaccactgtctgtgtttttttggcagttgtctgcattaacctgttc

SEQ ID NO: 910 - DNA, 366 bp, Homo sapiens
tcgctgtgagtaccttcaccagaaattgtcccacattaaaggtctcatcctggagtttgaggaaaagaacaggggcagctgaagttatcaagggaatttttgagcctctgcttagtgaaacacaaaggaacaaagcagctataaactaaatagaatgcaactatctgcttttcttatgctgaccactggagtccatggtggcaagtagagagctgctctaggttcttgaggtttggttttcattattaatttttagggtatgggcactgtgcaaagactccatagctgtgcctaggagtctaggaaaagtgacagaggcttggcttttttacctttagttcagccaagtcattttcaagtcctgag

SEQ ID NO: 911 - DNA, 532 bp, Homo sapiens
gccacttggcattagagggtctttcatggggagagaaggagactgaattactctaagcaaaatgtgaaaagtaaggaaatcagcctttcatcccggtcctaagtaaccgtcagccgaaggtctcgtggaacacaggcaaacccgtgattttggtgctccttgtaactcagccctgcaaagcaaagtcccattgatttaagttgtttgcatttgtactggcaaggcaaaatatttttattaccttttctattacttattgtatgagcttttgttgtttacttggaggttttgtcttttactacaagtttggaactatttattattgcttggtatttgtgctctgtttaagaaacaggcacttttttttattatggataaaatgttgagatgacaggaggtcatttcaatatggcttagtaaaatatttattgttcctttattctctgtacaagattttgggcctctttttttccttaatgtcacaatgttgagttcagcatgtgtctgccatttcatttgtacgcttgttcaa

SEQ ID NO: 912 - DNA, 404 bp, Homo sapiens
gtatcatgttttactacataggttaattttttaagggatgttgcaaagggattactagagaaagacaaaatgtgaccaaaaaaaagcatgaatatttcttaagtatctcaacaacatgtcaaagctgcatgtgtaggatgtatgctgtttgtacaaactatttcagaatattttgtaagctataacatatttattgtgcattaaaattaaatactttttccccaaaggcatgcagtcatgagaattacagaaaatttgcaacatataaagtagtttgatctaagaggattcaacacctttgttttgttgctcagtgtgtaatgactgagatttgtaaatctttgtgaacattctgtactggttcccaagagctattcattccctgctacctgatttcagcacaa

SEQ ID NO: 913 - DNA, 503 bp, Homo sapiens
tgttccaggtggccatagtcagtcaccatgtgtgggctcagggacccccaggaccaggatgtgtctcagcctggagaaatggtgggggggcagtgtctagggactagagtgagaagtaggggagctactgatttggggcaaagtgaaacctctgcttcagacttcagaaacaaatctcagaagacaagctgacctgacaagtactatgtgtgtgcatgtctgtatgtgtgttggggcggtgagtgtaaggatgcagtgggagcatggatgctggcatcttagaaccctccctactcccatacctcctcctcttctgggctccccactgtcagacgggctggcaaatgccttgcaggaggtagaggctggacccatggcaagccatttacagaaacccactcggcaccccagtctaacaccacaactaatttcacccaaggttttaagcacgttctttcatcagaccctggcccaatacctatgtatgcaatgctcctcagccc

SEQ ID NO: 914 - DNA, 331 bp, Homo sapiens
gccagaaagacacaaacagccctccgggcctttacgctggactctggcttggcaggctccaggcagggtcctctgggaagttactctagaaaacgaagggaggaggagcacaagatcctcagcaacgaacacctgcacttagaaaaagtggacagcttctgccaaccacaccctacccatggtactgtatgctattaactcctggaaacgccccgtaaatgcgagttgtttttgtatttgtgtgttgagatgggccttgtggtttctctgtactcagagcacatttcttgtaattactattgttatttttattgtcatgactgcccctgag

SEQ ID NO: 915 - DNA, 434 bp, Homo sapiens
tccagattatctctcctggacagcctcgtccccctacagcacagtgccaccctacagccctgggagctcaggccccgcaaccccaggggtcaacatggccaacagcatcgccagcctccgtctcaaggccaaggagttcagcctgcaccacagccaggtgcctacggtgaactgaagtccagtcccaccaggacccagacgcctccctgggtggacagcaatagaaaagggggcagacgcccaggaagtgaccttctcctggatgagctctcctggcccgtctgtccagcctggactcccgagcccacgaggctgttgaggcccctgcagccgggcccagctcttctgtccttggccaccagagactgcagcccacaacccttggaggggttgggccggaaggtggaagagcctgccaaggacctcatttagtt

SEQ ID NO: 916 - DNA, 488 bp, Homo sapiens
tagactctggccttcaccaatagtctctctgcaagacagaaacctccatcaaacctcacatttgtgaactcaaacgatgtgcaatacatttttttctctttccttgaaaataaaaagagaaacaagtattttgctatatataaagacaacaaaagaaatctcctaacaaaagaactaagaggcccagccctcagaaacccttcagtgctacattttgtggctttttaatggaaaccaagccaatgttatagacgtttggactgatttgtggaaaggaggggggaagagggagaaggatcattcaaaagttacccaaagggcttattgactctttctattgttaaacaaatgatttccacaaacagatcaggaagcactaggttggcagagacactttgtctagtgtattctcttcacagtgccaggaaagagtggtttctgcgtgtgtatatttgtaatatatgatatttttcatgctccactatttt

SEQ ID NO: 917 - DNA, 381 bp, Homo sapiens
gagatgttcatgttgctgagctgtaagcaggagcaccctgtcttctctggtctttgacttgattaaagtatctccgctttcttgggagggaataggggatgttttatcagtgaatgtgccatacaccttatggtccacttcatgtgcctttcagacttcaaagcgcgcgcgcatgtgtgtgtgtgtgtgtgtgtgtgtgtgtgtgtgtgtgtgcttctttttctctcctaaaaatcgataagtagctccacctgaagagggatggaacctctgggtcaggaaacagctggaatccacactcacctcattcccattgtttggatcatgcttctttccaacacgtgttcacaatctccaaagggactgtatttcttctctgtg

SEQ ID NO: 918 - DNA, 569 bp, Homo sapiens
gctggctgacaggatccctgtgttgtaattggtccctcctttcagctctctagtgagatgcccgtgtctgtgcgtgtgcgtgtgtgtttcatacagctagcattagatgggtgatgtttcttacttatcatccctaactattgcaacttgaccttaaaaagacaaaaccccacaaaactcttcctgccacgggcttgcagattgaagcactttcgatgttgggcgctggcgtttgtgttctgggcaccaccgtgaccctgcccagatggctataatattattttatacacaaaccttttttttcataaatgttataattttgtgtctgtctttataaactattataagtactatttttgttataattcaaaatagatatttagtataaagtttttgctgttaaatatttgttatttagtaaaatatgaattttgctctattgtaaacatggttcaaaatattaatatgtttttatcacagtcgttttaatattgaaaaagcacttgtgtgttttgttttgatatgaaactggtaccgtgtgagtgtttttgctgtcgtggttttaatct

SEQ ID NO: 919 - DNA, 460 bp, Homo sapiens
gtagaccacaattcactttttagttttcttttacttaaatcccatctgcagtctcaaatttaagttctcccagtagagattgagtttgagcctgtatatctattaaaaatttcaacttcccacatatatttactaagatgattaagacttacattttctgcacaggtctgcaaaaacaaaaattataaactagtccatccaagaaccaaagtttgtataaacaggttgctataagcttggtgaaatgaaaatggaacatttcaatcaaacatttcctatataacaattattatatttacaatttggtttctgcaatatttttcttatgtccacccttttaaaaattattatttgaagtaatttatttacaggaaatgttaatgagatgtattttcttatagagatatttcttacagaaagctttgtagcagaatatatttgcagctattgactttgtaat

SEQ ID NO: 920 - DNA, 540 bp, Homo sapiens
gaggacaatatccatgactgctcaaaacttaaaagtcctttgggggtcaaatggcatacggcagtcacctatgtgaacagctgcttgtttgtggccgtgctggtgattctgatcggatgttacatagccatatccaggtacatccacaaatccagcaggcaattcataagtcagtcaagccgaaagcgaaaacataaccagagcatcagggttgttgtggctgtgttttttacctgctttctaccatatcacttgtgcagaattccttttacttttagtcacttagacaggcttttagatgaatctgcacaaaaaatcctatattactgcaaagaaattacacttttcttgtctgcgtgtaatgtttgcctggatccaataatttactttttcatgtgtaggtcattttcaagaaggctgttcaaaaaatcaaatatcagaaccaggagtgaaagcatcagatcactgcaaagtgtgagaagatcggaagttcgcatatattatgattacactgatgtgtaggccttttattgtttgttg

SEQ ID NO: 921 - DNA, 232 bp, Homo sapiens
ttccccacctttcgtgtaaggtgctactgaacatgacagcttcttgtcatgacaggaaacttgcatcagttggatatccttttgagaaactgaattttgcaaagggccaaatttccccaaactgaacgggctcaggaaatgttcctttacactcagaacattctattttaagtatattatttattgttggcagttcctcagggatttcccttttctctgtattggtcagtgt

SEQ ID NO: 922 - DNA, 424 bp, Homo sapiens
aaatgactgtcttatcactcttatttgacatttcgtaggtgtaagagaaatggaaatgaatggtttcaacaaagatcatttaatacagcagagcatggcatgaccaagcatctttgtaaagtgttagatggaaaatgctgtgtgctgccatggtaatcagaaataataacctgttagggatgtattctaggaaatcagaagtagttctcttttcttgctggattattgcttagataactcttgttttctggtaaaactttagttgtattgccatccactcctttttcaaatgagtttaatgccataaagctgatattctttgtccgattaatttgaaatctgcacagaagctgttttagtcattaatgtgtaacaaaagtagcttatagaatatggactgccttattgctgttgcttatcattt

SEQ ID NO: 923 - DNA, 571 bp, Homo sapiens
agtctgaaggcgaaagttccagcaaattaaagcagaagttggaagctcatatggaaaaactcacagaggtccatgaagaattacagaagaaacaagaactcattgaagatcttcagccagatataaatcaaaatgtacaaaagatcaatgaacttgaagctgctcttcagaagaaagatgaagatatgaaagcaatggaggaaagatataaaatgtacttggagaaagccagaaatgtaataaaaactttggatcccaagttaaatccagcatcagctgaaataatgctactaagaaagcagttggcagagaaagagagaagaattgagattctggagagtgaatgcaaagtagcaaaattccgtgattatgaagaaaaactcattgtttctgcgtggtataataagagtctagcattccagaaactggggatggaatctagacttgtgagcggcggtggtgcctgcagtgacactggtgcgtgcactcctgcgcggtctttcttagcgcagcaacggcacatcaccaacaccagaagaaatctctctgttaaagtccctgctacaacatc

SEQ ID NO: 924 - DNA, 385 bp, Homo sapiens
aaaacacctgaatgactctaagactgatatgtattttcaagtctaagctgtcttacagaagatcttttataaatgtttccttataaatatctcaccattacaacaaattgttttaactgtttttctattagctctagctgcatatttgatgtaaatgacaattactgaaaaaatgtcagaaaaaacattttcagtactaacattaaagtgccatatgtaaaaaagaaaaatgtgatttgtataactaaataacacacaaacatcaagaggctatttatacaaataatttatttccactagggaaagtgcattactggtgaaggtattatcaatttattctacttgcttataatgttacagtgaatgttctggcttactctgcctc

SEQ ID NO: 925 - DNA, 386 bp, Homo sapiens
cctcaacccagagagctttgcaatcagcttgacctgtggggactcagaagaccctcctgccgatgtggcaatcgaactcaaagctgtgttcacagatcggcagctactcagaaattcttgtatatctggggagaggggtgaagaacagtcagcaatcccttactttccattcattccagaccagccattcagggtggaaattctttgtgagtacccacgtttccgagtgtttgtggatggacaccaactttttgatttttaccatcgcattcaaacgttatctgcaattgacaccataaagataaatggagacctccagatcaccaagcttggctgatttaaaccacctctatttcaaataggatcacgtgccacaactatctgac

SEQ ID NO: 926 - DNA, 480 bp, Homo sapiens
ctggacccgtgaagtcttcagctcctgcagctctgaagtggttctgaacacaccacagccatcagcactggaatgcaaagaccagaacaaacagaaggaagccagcagccaagccggggcagtttcagtctccaccccaaatgcaggactgtagaagcggccaggaagaaaaccaccccctcttaaggttgtttttgtgaccgttctttggagcattgttctaaaaatgggaaattacatattgctgtgccaagggcaacaaacacctgcagttaaaggaataccttccgcgaggcggcttttcggagcatgcatgtttatagctccagccaggccagaccgagggctgctgcataagccctgcttggtgcatttcttcacttgcaaggggacagagtgtgggcttaggtttgggactagagggggctttggcaactatggtgctcaggtgattatccttcgctcgtttatccaataaac

SEQ ID NO: 927 - DNA, 514 bp, Homo sapiens
aaccagaacaacctgcacttctgccaaggccagggccagcaggacggcaggactctagggaggggtgtggcctgcagctcattcccagccagggcaactgcctgacgttgcacgatttcagcttcattcctctgatagaacaaagcgaaatgcaggtccaccagggagggagacacacaagccttttctgcaggcaggagtttcagaccctatcctgagaatggggtttgaaaggaaggtgagggctgtggcccctggacgggtacaataacacactgtactgatgtcacaactttgcaagctctgccttgggttcagcccatctgggctcaaattccagcctcaccactcacaagctgtgtgacttcaaacaaatgaaatcagtgcccagaacctcggtttcctcatctgtaatgtggggatcataacacctacctcatggagttgtggtgaagatgaaatgaagtcatgtctttaaagtgcttaatagtgcctggtacatgggcagtgccca

SEQ ID NO: 928 - DNA, 554 bp, Homo sapiens
aaggggacacgtgacagccgtttgttccccaagacattctaggtttgcaagaaaaatatgaccacactccagctgggatcacatgtggacttttatttccagtgaaatcagttactcttcagttaagcctttggaaacagctcgactttaaaaagctccaaatgcagctttaaaaaattaatctgggccagaatttcaaacggcctcactaggcttctggttgatgcctgtgaactgaactctgacaacagacttctgaaatagacccacaagaggcagttccatttcatttgtgccagaatgctttaggatgtacagttatggattgaaagtttacaggaaaaaaaattaggccgttccttcaaagcaaatgtcttcctggattattcaaaatgatgtatgttgaagcctttgtaaattgtcagatgctgtgcaaatgttattattttaaacattatgatgtgtgaaaactggttaatatttataggtcactttgttttactgtcttaagtttatactcttatagacaacatggccgtgaactttatgctgta

SEQ ID NO: 929 - DNA, 547 bp, Homo sapiens
gaacgtcgtatgagatcctacaatggaagaataaaatcacctcattcttcatttcagatctgaacattagcagtgatctagatttttttttttttaaacaaaattaagtgtgcttagagtcatccctctacatgggctgtggctgtcagcccataggtttgtcagtttcacatcaaaactgtgggtataaactgttgaaaccaatcacattaaaatatttagctgggcacagtggtgtgcatctgtagtcccagctacttgggaggctgaggcaggaggatcgcttaagcacaggagttggaatccagcctgagcaacagagcaaaaccccgtctctaaaatacaaataaaatatttgtgtagtttttgattaaaattgactacagcggtcagtataaaatacatgtcgcttttaaggaagtgctctttatgtatctaacagatggaagtttttgcattggtaagagcatttatatatgctttgtttcagggtttatggatttgtattcatatattgtcaaataggtttcatactctaattttactt

SEQ ID NO: 930 - DNA, 402 bp, Homo sapiens
gatgagatggttgttgccctagtctgttggtagaaccagaaatcaatatgttgtcttttaggttaaagcttgtaccaaaatatttatttcccccatttcaagccctgagtcaaacatttttttctcttaataatagacctgaaatgttttattagtatttctgtgaaatcagttgattcttgtgccatttttgtatatgtaattgtaattttgcccatgttaggccctctaaaaaatgtttgacatcctttgagatattttattactaaaatctgatcttttttggctactgcaaaaatctattcagcaagaaggtatcagctgcataccttgcacagtggagctgactacctataaactctccctaaggcatttgtttacaggtgtattccattttagcag

SEQ ID NO: 931 - DNA, 452 bp, Homo sapiens
cgccgactcttttcactgagtttccagaggaagactagcgcggccaccgcgaagccgccaacccaccggagagggggcttctgaacttggactcctgggaacatggacaagcccggcgctgccacgccggggcctccaccgcctgggcctgagcctgaccgggccattcccaaatttgggacgcggaaggagaggctctcggagcagaagaggccagataccctgaagcataaagtttaacgtcaaaagtttaacatggagaaggcggttccgttctgaagcgtggtctgctgtcccctgggcgtgaggcctcctgggcctgtcgggcctccgatttcatcctcagacgtaatgctcaccaacagcacttgcactgagttgactcttgcacactcgactccataatatgatgctttttaagatgtatgttcacaccaataattgcctgcttc

SEQ ID NO: 932 - DNA, 496 bp, Homo sapiens
tgacaggaccaggatgtccctcatctttgccaaccagacagaggaggatatcttggtcagaaaagagcttgaagaaattgccaggactcacccagaccagttcgacctgtggtacaccctggacaggcctcccattggctggaagtacagctcaggcttcgttactgccgacatgatcaaggagcaccttcctcctccagcgaagtccacgctcatcctggtgtgtggcccgccaacactgatccagacggcggctcaccctaacctggagaagctgggttatacccaggacatgattttcacctactaacaaacacctccatgtgctcagcaaatttgcatgtcccttttcatctgtttcagagtaagttcaatttcaccacggtaaactgggatgttttcaaaagtgccttgccatgtaccttcgcgcacacactggttctcctcttttgggtgtgggcctaacaaaaagggctcaaggggctggagactggct

SEQ ID NO: 933 - DNA, 487 bp, Homo sapiens
ggcccacctcagctgtagtggtacctgccacggggccagccccccacagcgcaggggctggtctgctgcggatctcagtgaaggaggtggtgcggaggcaagaggctgggctaggtgagcctagcttggtggccctggtggtgtttggggccctcactgctgccctggttctggctactgtgttgctgaccctgagggcctggcgccggggtgtctgcccccctggaccctgttgctaccctgccccacactatgctccagcgtgccaggaccaggagtgtcaggttagcatgctgccagcagggctccccctgccacgtgacttgccccctgagcctggaaagaccacagcactgtgatggaggtgggggctttctggcccccttcctcacctcttccacccctcagactggagtggtccgttctcaccacccttcagcttgggtacacacacagaggagacctcagcctcacaccagaaatatta

SEQ ID NO: 934 - DNA, 321 bp, Homo sapiens
tccattaccaagagctcatgccacccggttcctgcatgccagaggagcccaagccaaagaggggaagacgatcgtggccccggaaaaggaccgccacccacacttgtgattacgcgggctgcggcaaaacctacacaaagagttcccatctcaaggcacacctgcgaacccacacaggtgagaaaccttaccactgtgactgggacggctgtggatggaaattcgcccgctcagatgaactgaccaggcactaccgtaaacacacggggcaccgcccgttccagtgccaaaaatgcgaccgagcattttccaggtcggacc

SEQ ID NO: 935 - DNA, 194 bp, Homo sapiens
gcatcagtgaatcgggccacatctgcagccagatgttcgaaggccagatcctggacgtgaagggaggccggggctacgaccgggaccacgtggtgctatgggagccggatgaggacagggcatcccagatctggactatccacgtgctttgaaacttttcccctcaccctccagccctggaggcttttgctggg

SEQ ID NO: 936 - DNA, 415 bp, Homo sapiens
aaagactggaacccacgttctcagctctcaccaagtggactttttgcggggtgtggcggccgggtctcgaccacagcgtggatcaccggctgtttaggaaactgcagctgcacaacgtggggtgcaaaactgccccgcttcctttacagctcttctcaaccctcacctccatcccccgtcacccaggcaccttcgcttccagatgctgccaggctgtcactcaattcggtcatttcattcatttatcacacatgggcactggggttgggctaacagcaagagacaataggcctttgttcctatttattgggtactgcttacgtgctaagcagatcagtttatttaatgcttgcaacgactctctgaggtagaaaatattgttaattccgttcaggatcccggctacataatctgt

SEQ ID NO: 937 - DNA, 523 bp, Homo sapiens
agctcacgatgggcagtgttctccatactattattagctctcatgtcccccctgggcctagccgtagggctggctgtgactggaggggactctgaaggagggcggggcttagcccaggctgtgttagagggtgtggcagctggtaccttcctgtatgtcaccttcctagaaattcttccacgggagctagctagtcctgaggcccctctagctaagtggagctgtgtagccgctggttttgccttcatggcctttattgccttgtgggcctgagagattcctggcttttctgatggacctatttaggacaacctctctatccccagggagacctcccaaatggctttgaccctcagacatttctttactcagactaaatagcattcagtaggactggactggaccccaggtttcctttacatgagatcccatttctcaccctggactaagacaaagatatttaggttgagcagctattaattggagaattggtacagagacgctccagattttattcttatcc

SEQ ID NO: 938 - DNA, 511 bp, Homo sapiens
aaggaaactcatctccgaggttgacagcgacggcgacggcgaaatcagcttccaggagttcctgacggcggcaaggaaggccagggccggcctggaggacctgcaggtcgccttccgcgccttcgaccaggatggcgacggccacatcaccgtggacgagctcaggcgggccatggcggggctggggcagccgctgccgcaggaggagctggacgccatgatccgcgaggccgacgtggaccaggacgggcgggtgaactacgaggagttcgcgaggatgctcgcccaggagtgaggctccccgcctgtgtccccctggctgcgctctgagccttcagggccaccgcccgctgctgcttttgtgctgggactctccggggaaacctggtcggtggatgggaaactgcctccccctgggaggaaggctttgcgctccggggcctggatgcggcgccctcgggccgcctgcgagcccctctctgccttcagaccttgggcagaaggaggcctc

SEQ ID NO: 939 - DNA, 389 bp, Homo sapiens
ctagaatttccatgtctctgcttagctgtgctggcagctagcagctggctgtgtttgcagtgcaaatagctctgttcttggaaatcctgctcatggtatgtccccagtggtttcttcatccacatcatctaaagcctgaacccgttcttctctggttcaagtcagtggctgacacggacttgtatctccttcagagctcggctggcacccagcctcccttctccttccactcccttagtacactggagtgccgagccctgccttccacccagcgtccatccagcccctgtcctcacctctccggcacctcctcctccttctgcatttcctatcttcctgtgtcttgtgcatgggaagcagccttcagtgccttcatgaattcaccttcc

SEQ ID NO: 940 - DNA, 466 bp, Homo sapiens
gcatgtgtttggtatcttcaacagtagaccaagaatctaacatcactctcagtaatatagagaccggaatacatggtttataggaaatgatcaaatgatccaaaaaaactccacattttttaagaagttggaatttgatttcatgcataactgtattaaaacattaaatagaaataatgtcatttgaatgaaaatcttatcacattaaattcactgtgaaggcagcatacttaaaggaatttgatttcatgcataactgtattaaaacattaaatagaaataatgtcatttgaatgaaaatcttatcacattaaattcactgtgaaggcagcatacttaaatttttattttgaaaagtctaaaaggcttagatttttaaaatttaataattatttctacaaattttctatttttcttgaggtgattctcaactagcaattggaactcctaggctctattaacataa

SEQ ID NO: 941 - DNA, 505 bp, Homo sapiens
ttcctgttactttcacctcaggtcgtaactttctttatgtgtttcattacagctccaaaaagccttccagaatttcctgaggcaaaaacacccttcccttttgagaaacctaggggcacattgggtaataagagtaccttaaatttaatattaaggctgtgggtggtgattgcttaattctgcaggacacatttactgcatcttatttctggaaacctcatgaactgatagttaggcaaacaaatggttgatttgatttttttttaataaatctatttggattttctgcaaattcggtaaaacccatcagtcttaattccacataatccacttagctttttgtccttaaaaatgctgacagtctgacaccaaactctggtctctctctgaccactaatcaaatgttctctggatggatacatactgatttcttactgatatataatgactttttattgtattggtatactgcaggcttctggtagccacttaaccataccagcaa

SEQ ID NO: 942 - DNA, 545 bp, Homo sapiens
aactgatggctggcatctgatatgcagagttagtcaacagacactggcatcaattacaaaatcactgctgtttctgtgattcaagctgtcaacacaataaaatcgaaattcattgattccatctctggtccagatgttaaacgtttataaaaccggaaatgtcctaacaactctgtaatggcaaattaaattgtgtgtcttttttgttttgtctttctacctgatgtgtattcaagcgctataacacgtatttccttgacaaaaatagtgacagtgaattcacactaataaatgttcataggttaaagtctgcactgacattttctcatcaatcactggtatgtaagttatcagtgactgacagctaggtggactgcccctaggacttctgtttcaccagagcaggaatcaagtggtgaggcactgaatcgctgtacaggctgaagacctccttattagagttgaacttcaaagtaacttgttttaaaaaatgtgaattactgtaaaataatctattttggattcatgtgttttccaggtggata

SEQ ID NO: 943 - DNA, 414 bp, Homo sapiens
gggctgatcaggttgggttatgcaagaatctcccatgctgaactgagtgattcagaaattcagatggcaaaatttaggatccctgatgaccccactaattatagagacaaccagaaagtggtcatagaccacagagaagtttctgagaaaattcattttaatcccagatttggatcctacaaagaaggacacaattatgaaaacaaccataattttcatatgaatactcccaaatactttttatgaaacatttaaaacaagaagttattggctgggaaaatctaagaaaaaaagtatgtaagataaaaagaagagattaatgaaagtgggaaaatacacatgaagaacctcaacttaaaaaacacatggtatctatgcagtgggaaattacctccatttgtaaactatgttgct

SEQ ID NO: 944 - DNA, 163 bp, Homo sapiens
gaaaagtagctctaatcaagtgatatttctgggatatatcacttcagcacctggctccagagattatctacagctcactgaacatggcaatgtgaaggatatcgacagcactgatcatgacagatggtgtgaatacattatgtatcgagggctgatcaggttg

SEQ ID NO: 945 - DNA, 553 bp, Homo sapiens
atttctccggaagctgagccagtctcctggtctagcccaggttgccagaacgcttggcattgcagagtgctagagccagtggagaacttgccaacttgattgttttacagcagaggaaagaggatcacagagggaaaatgattcacccaaagtcacacagcaagttcatggctgagctgagaccaggattaagcttcctgactcccagttcaccatgaaaagggttctggcaacaggttcaagctggagaatccttcaaaatgctacacccacattctctccaactcttcatctccctgatcttccagacaaactacctggatgttgcccttaaaccatttctagctgttaaccctatccagaaaaatgattgagtgatagctgagaagtggaaagtgtgggatttttggcaggtgctctctttcctccgccccccgcgccatcctttctcttcctcctctctgtaatggtatgtccagcctcactctccctccctggtgctgtatgcgttccccctgttagctacatttgtgatcacatacccttcttttaa

SEQ ID NO: 946 - DNA, 560 bp, Homo sapiens
gagtgcagtagcacgatctcggctctcaccgcaacctccgtctcctgggttcaagcgattctcctgcctcagcctcctaagtatctgggattacaggcatgtgccaccacacctgggtgatttttgtatttttagtagagacggggtttcaccatgttggtcaggctggtctcaaactcctgacctagtgatccaccctcctcggcctcccaaagtgctgggattacaggcatgagccaccacagctggcccccttctgttttatgtttggtttttgagaaggaatgaagtgggaaccaaattaggtaattttgggtaatctgtctctaaaatattagctaaaaacaaagctctatgtaaagtaataaagtataattgccatataaatttcaaaattcaactggcttttatgcaaagaaacaggttaggacacctaggttccaattcattcacattcttggttccagataaaatcaactgtttatatcaatttctaatggatttgcttttctttttatatggattcctttaaaacttattccagatgtagttccttccaa

SEQ ID NO: 947 - DNA, 288 bp, Homo sapiens
ggctgaaaggattttacatttattcaaagtcaaaagggaaaagaaatccaagaactacagaagagcagttgaagtgatttatgcttgatttctaaatgcaacttatgtttatacataatttaaaactcaaagaaagcatgcttatacaatcatgtgcaactttaaactttaagaactctggatgaatacatggtggcaacagtccatgacacctgaaaacatcatttgtggagtggcgtagagttcagtgttcgcagtcgcatattacaaccatgtttcacacagccc

SEQ ID NO: 948 - DNA, 513 bp, Homo sapiens
tttttatctccacacgcagtatgaagataaaattacatagtattacctagacatagacagtattacctaggtagatgcactgctcacctgcacccttcccagctctcatttttgttaggtgatttgggatagggatagtgttttggggtatggggggagtgtttctgacctgctttgcagacgtgcctccgcacctcagcagtttggggtgtggccccagggcggttcttggatgtaaaagatgtggccatctagcctcgtaacttcactgtcacctgtgtcccatagggtgccttctgaatactgttattagaataagtttgttgcagaacgtgaccctgcgtgcaaacatgtaccgtggcctggtatatgatagagattgatattaatgtaccatgtatgttaatgtgaatctgtgggcaggatacttttccatggcaggaaatatccaagctgttgaaactggctatgttttaatatgcctcattgtgcctttactgttgtgtggactgc

SEQ ID NO: 949 - DNA, 284 bp, Homo sapiens
ctttatcatccccacaaacattttgaaactggaatatttgtcttcagaaaatggaaacaagactataaatgataagccctgtccctagcaccacctctcctgtgtgtggaatagaggcccctcgtgctaccaacacttaccctgtgtttaaaaagatcttgtaccaagccaacggcgttcctggctctcctgcccacaggatgaacattttcggcttccttaggagttttgccctaccgtattccaaagcgtgtgctggtttctcatattgtctgtaggctcac

SEQ ID NO: 950 - DNA, 511 bp, Homo sapiens
gggacttaacatttcacgttgtatcttacttgcagtgaatgcaagggttacttttctctggggacctcccccatcacccaggttcctactctgggctcccgattcccatggctcccaaaccatgccgcatggtttggttaatgaaacccagtagctaaccccactgtgcttccacatgcctggcctaaaatgggtgatatacaggtcttatatccccatatggaatttatccatcaaccacataaaaacaaacagtgccttctgccctctgcccagatgtgtccagcacgttctcaaagtttccacattagcactccctaaggacgctgggagcctgtcagtttatgatctgacctaggtcccccctttcttctgtcccctgtttttaagtccggatttttacagaaggaactgtctccagacagctcatcaaggaaccaagcaaaggccagatagcctgacagataggctagtggtaattgtgtatatgggcgggacgtgtgtgtcatta

SEQ ID NO: 951 - DNA, 316 bp, Homo sapiens
cctctgtcctcaaatgtccaaaatgttggaggacctctgttcatatcccacgcctgggctcttgccagcagtggagttactgtagagggatgtcccaagcttgttttccaatcagtgttaagctgtttgaaactctcctgtgtctgtgttttgtttgtgcgtgtgtgtgagagcacatcagtgtgtgcaggctgtgtttccccatttctctcctcccttcagacccatcattgagaacaaatgtaagaaatcccttcccaccaccctccctgcctcccaggccctctgcgggggaaacaagatcacccagcatcct

SEQ ID NO: 952 - DNA, 149 bp, Homo sapiens
  misc_feature (55)..(55): n is a, c, g, or t
atattttgtatcatcgtgcctatagccgctgccaccgtgtataaatcctggtgtntgctccttatcctggacatgaatgtattgtacactgacgcgtccccactcctgtacagctgctttgtttctttgcaatgcattgtatggcttta

SEQ ID NO: 953 - DNA, 475 bp, Homo sapiens
cttggtgtcctggtgtgaatagacaagaagctgtactatatgttgctctctcagtggcaacaatgaagtttttgcaattctagaacttggatttttttttaacaaaagtcccaaaacaccaaaaatgtaaacaagataagagattaatattgtagtgatgtaatttaattaaagttatattttgggttaattttaacaactgaagtcttattgttgaaacttattttcaacaaaactgtgcagttaaatttgtatacgtattcacatactgaaagatgaaccgttaaaatagcacttaattttgtgtttcttcaatatgtcttgatatactttgtgcaattaatattacacatgtaagttgtatggcagtttacagaactcaatgacttgtcatgaggttttcatatgagctacacattgtgtacattgattgttttttatttttacataaatccattctgtcattttcaacttt

SEQ ID NO: 954 - DNA, 402 bp, Homo sapiens
aaagtcagtccattttcaagttttggtcttcagagacaaaagaacgtcccagccacctgattttgatggtgaggtaactctaagttgaattcaggctagtgttgcagtatagctttggcatgttcatgagtgagcacccagaatgtgttgaaccaacccccacccctaactactgactatgactgcagtgggtttttatggggaaaaaaagtgtgaaaagcaaaaagaaaggaacagagattttttatcacctttattgtaagacagtccatttatgaattgagtataaacacatacaaagtaacaagagattcctaagaaacgcaaatccttgagtttcacgcacttcatgttcaaccatttgctgtaatccagaggcagcctgtgaatcattctcatgcc

SEQ ID NO: 955 - DNA, 523 bp, Homo sapiens
  misc_feature (29)..(29): n is a, c, g, or t
atccgacttgaatattcctggacttacanaatgccaagggggtgactggaagttgtggatatcagggtataaattatatccgtgagttgggggagggaagaccagaattcccttgaattgtgtattgatgcaatataagcataaaagatcaccttgtattctctttaccttctaaaagccattattatgatgttagaagaagaggaagaaattcaggtacagaaaacatgtttaaatagcctaaatgatggtgcttggtgagtcttggttctaaaggtaccaaacaaggaagccaaagttttcaaactgctgcatactttgacaaggaaaatctatatttgtcttccgatcaacatttatgacctaagtcaggtaatatacctggtttacttctttagcatttttatgcagacagtctgttatgcactgtggtttcagatgtgcaataatttgtacaatggtttattcccaagtatgccttaagcagaacaaatgtgtttttctatatagttccttgccttaa

SEQ ID NO: 956 - DNA, 491 bp, Homo sapiens
  misc_feature (332)..(332): n is a, c, g, or t
  misc_feature (365)..(365): n is a, c, g, or t
cccaggcctgtcactttgagaggggcaaaactgagaggggcttttcctagagaaagagaacaaggagcttgccaggcttcatgtagccgacacacgtctcaggattttaagtccacattggcctcacactaccagggccaatgcccaaaataaggagttccaatttggggccaaatgaggaaggacacagactctgccctgggatctcctgtgctagcggccaatgacaaatccagtcattggccaccagccacctctgcagtggggaccacactagcagccctgactccacactcctcctggggacccaagaggcagtgttgctgtctgcntgtccaccttggaatctggctgaactggctggnaggaccaagactgcggctggggtgggcagggaagggaagccgggggctgctgtgagggatcttggagcttccctgtagcccaccttccccttgcttcatgtttgtagaggaaccttgtgccggcca

SEQ ID NO: 957 - DNA, 253 bp, Homo sapiens
gtaaatagttaaccttcagtagtctattaaggcattaatacttctctggacatgcgcgtttgagggtggaggggtcctgtaaggtgcttcatcgtctgtgattactgcttgggatgtgttctttggcagcttgtgagattactttacctagtgtttataaagtaggaagttaagtgaatcatagattagaatttaatactcttatggaaataattttttaacatcttaattgacaatggcgtttttttataca

SEQ ID NO: 958 - DNA, 480 bp, Homo sapiens
  misc_feature (57)..(57): n is a, c, g, or t
  misc_feature (65)..(65): n is a, c, g, or t
gtaggctcagcgatagtggtcctcttacagagaaacggggagcaggacgacgggggngctggggntggcgggggagggtgcccacaaaaagaatcaggacttgtactgggaaaaaaacccctaaattaattatatttcttggacattccctttcctaacatcctgaggcttaaaaccctgatgcaaacttctcctttcagtggttggagaaattggccgagttcaaccattcactgcaatgcctattccaaactttaaatctatctattgcaaaacctgaaggactgtagttagcggggatgatgttaagtgtggccaagcgcacggcggcaagttttcaagcactgagtttctattccaagatcatagacttactaaagagagtgacaaatgcttccttaatgtcttctataccagaatgtaaatatttttgtgttttgtgttaatttgttagaattctaacacactatatacttccaa

SEQ ID NO: 959 - DNA, 323 bp, Homo sapiens
tcgactctgctgctcatgggaagaacagaattgctcctgcatgcaactaattcaataaaactgtcttgtgagctgatcgcttggagggtcctctttttatgttgagttgctgcttcccggcatgccttcattttgctatggggggcaggcaggggggatggaaaataagtagaaacaaaaaagcagtggctaagatggtatagggactgtcataccagtgaagaataaaagggtgaagaataaaagggatatgatgacaaggttgatccacttcaagaattgcttgctttcaggaagagagatgtgtttcaacaagccaacta

SEQ ID NO: 960 - DNA, 533 bp, Homo sapiens
gagccctaattgatatgtatacagaaggtatggcagatttgaatgaaatgatccttcttctgcccttatgtcgacctgaggaaaaagatgccaagattgccttgatcaaagagaaaacaaaaagtcgctatttccctgccttcgaaaaagtgttacagagccatggacaagactaccttgttggcaacaagctgagccgggctgacattagcctggtggaacttctctactatgtggaagagcttgactccagccttatctccaacttccctctgctgaaggccctgaaaaccagaatcagcaacctgcccacggtgaagaagtttctacagcctggcagcccaaggaagcctcccgcagatgcaaaagctttagaagaagccagaaagattttcaggttttaataaagcagccatggaggctaagaacatgcaagaccaatattctaaagttttgcaacaatgaagtgctttacttaagtgttgattgtgcctgttgtaaagctaatgaaccctttccaattatatgctaat

SEQ ID NO: 961 - DNA, 472 bp, Homo sapiens
ccggcccaggctcactgggccagtgggaggctggacatcagcaacaagacctatgagactgtcgccagcctgggagcagccacccctcagggcgagagtgaggactgtcccccgcccttgccagtcaaaaactcttctcggactttggtccaagggtgtgcaagacatgccagtggagatcgttctgagcaaagaaagaagggagagtaatagaattgggagggcagagacttaagggttctgcttcccagccctagaaattctatcattgctcagccccaatgagaaagcagatacacctaagccatcatcaaccactaacatctcaacttgccagttgctgggtgctgggccctggcaggaatgggccaagccaagcaggggagactagagagcaccaatggccaacacagctgcctggctggggaggctgtgctgtttcccctggagacctgactggtctgtggttccc

SEQ ID NO: 962 - DNA, 495 bp, Homo sapiens
gccggtgagatgctctatctgccggctctgtggttccaccacgtccagcagtcccagggctgcatcgcagtgaatttctggtatgacatggaatacgacctcaagtatagttacttccagctgctcgactccctcaccaaggcttcaggccttgactgatggagcactggtgaacaccaccaagcacgcctcgggggacggagccagcccccccctggccaggtcgagagagcctggagtgtgcatgctggctgctggccccgggtccagcatggcttgagatcagctttggaggatcttggaatgtggtcataaggactcaaggtgccaggcaggtctgggtgagggttctcaggaagttgccacacaggtgagcagagtggggatcaggtgcagcggcacctctccccagcgctgtgatgttgggcgagtcactgcgtctcgggcattggtgtcctgtcagtaaagagataataatggctgtacctcgcgggg

SEQ ID NO: 963 - DNA, 120 bp, Homo sapiens
  misc_feature (43)..(43): n is a, c, g, or t
cctttccgtttctgtctatgatgtaggcttctgaggagaaccnagaagcttggctttagtggtagaatgacagaacttagggatcccttgcaggctagaacaaagttctgacccttagac

SEQ ID NO: 964 - DNA, 494 bp, Homo sapiens
  misc_feature (335)..(335): n is a, c, g, or t
gacctcttgaagcccaattattgcctcaatccagaaaagtttacttctctttatctgtgctttactgacagaagggcaagtcttctctcgttttttgcagataaaattttagatgtgttgcattcattgggtttctatgagatgtggttttatcagacaattttttcttttatttcacaattactttaatatctgtaaaataaagaattattttaattcattttcccagtcccaaaagttaaatacaggccacttacttctttaaccaaatgatatagtttggctctgtgtccccacccaaatctcatgtcaaattgtaatccccgcatgtcagnggagggacctggtgggaggtgattggatcatggggagggatttcccccttgctgttctgttgatagtgaacgagttctcacgaaatctgatggtttaaaagtgcagcacttctccctttgctctctctctcctgctgtgccatggtaagacgtgccttg

SEQ ID NO: 965 - DNA, 324 bp, Homo sapiens
tgattttaaaattggcctcctcaaagtttagcgtcttgcataatgatgatgtacgtctctggcatattacattttcctttgtatatcattattgaggttatttgtctgatatgacccaaagaggcaaaactcagcacagtcctttctgcagtattctaaaggtcatcaaacttcagcctagtgagtctgcttgtttgatttggccggacattttaagcatggcagaagtggtacaagaaatcatggtattaagttgaaaccacaccccttagaaaaatccttctattaattcaaataatttgacgatgcttatgcggtttctga

SEQ ID NO: 966 - DNA, 478 bp, Homo sapiens
ttcacaaacttttatactctttctgtatatacattttttttctttaaaaaacaactatggatcagaatagcaacatttagaacactttttgttatcagtcaatatttttagatagttagaacctggtcctaagcctaaaagtgggcttgattctgcagtaaatcttttacaactgcctcgacacacataaacctttttaaaaatagacactccccgaagtcttttgtttgtatggtcacacactgatgcttagatgttccagtaatctaatatggccacagtagtcttgatgaccaaagtcctttttttccatctttagaaaactacatgggaacaaacagatcgaacagttttgaagctactgtgtgtgtgaatgaacactcttgctttattccagaatgctgtacatctattttggattgtatattgtggttgtgtatttacgctttgattcatagtaacttcttatggaattgat

SEQ ID NO: 967 - DNA, 44 bp, Homo sapiens
gaaagcatgtctgctgggtgtgaccatgtttcctctcaataaag

SEQ ID NO: 968 - DNA, 65 bp, Homo sapiens
ggaaagcatgtctgctgggtgtgaccatgtttcctctcaataaagttcccctgtgacactcaaaa

SEQ ID NO: 969 - DNA, 494 bp, Homo sapiens
  misc_feature (33)..(33): n is a, c, g, or t
  misc_feature (35)..(35): n is a, c, g, or t
  misc_feature (45)..(54): n is a, c, g, or t
  misc_feature (168)..(168): n is a, c, g, or t
  misc_feature (203)..(257): n is a, c, g, or t
  misc_feature (304)..(304): n is a, c, g, or t
  misc_feature (306)..(306): n is a, c, g, or t
  misc_feature (348)..(362): n is a, c, g, or t
  misc_feature (427)..(427): n is a, c, g, or t
gaagaaggggccatcacaggatgccacccctgncntgggttgggnnnnnnnnnncacgaccagccccttcctgggtatttattctctatttattggggataggagaagaggcatcctgcctgggtgggacagccccttcagccccttctcccctccccgcctggccanggcagggccaccccactctacctccttagctttcnnnnnnnnnnnnnnnnnnnnnnnnnnnnnnnnnnnnnnnnnnnnnnnnnnnnnnnagagctgacgggaggccccagctctgaggggagggggtccgtggtanangcctggggccggtagaggctccccagggctcccttatgtccnnnnnnnnnnnnnnngggtgtggatgtaattagctctggggggcagttgggtagatgggtgggggctcctggtggccttntgctgcccaggccacagccgcctttgggttccatcttgctaataaacactggctctgggactagaaa

SEQ ID NO: 970 - DNA, 332 bp, Homo sapiens
  misc_feature (229)..(252): n is a, c, g, or t
gaaacccaggtgctggaccagggccctcagggaggggaccctgcggctagagtgggctaggccctggctttgcccgtcagatttgaacgaatgtgtgtcccttgagcccaaggagagcggcaggaggggtgggaccaggctgggaggacagagccagcagctgccatgccctcctgctccccccaccccagccctagccctttagcctttcaccctgtgctctggaaannnnnnnnnnnnnnnnnnnnnnnnaggaggagcaaaaatgagccagcaccagcgccttggctttgtgttagcatttcctcctgaagtgttctgttggcaataaa

SEQ ID NO: 971 - DNA, 279 bp, Homo sapiens
cttctacaggcttttgggaagtagggtggatgtgggtagggctgggaggagggggccacagcttaggtttggagctctggatgtacatacataagtaggagcagtgggacgtgtttctgtcataatgcaggcatgaagggtggagtgaagtcaggtcataagtttcatgtttgcttttgttttgttttgtttttaatgtatgtagcagatgttacagtcttagggatccgggatgggagaccccactttagaaagggtcgtcactcctttaatcctcta

SEQ ID NO: 972 - DNA, 145 bp, Homo sapiens
ctgaacgggcgactgtgtcttgactacctttcaaaaccagcactgtgtgggaatgtccgccaggcagagctcggagcctcattgagacaggggagagagaaagacaaagaggggaccttcttccagatgccttcccagttgtaac

SEQ ID NO: 973 - DNA, 499 bp, Homo sapiens
  misc_feature (200)..(204): n is a, c, g, or t
  misc_feature (230)..(230): n is a, c, g, or t
  misc_feature (235)..(235): n is a, c, g, or t
  misc_feature (239)..(239): n is a, c, g, or t
  misc_feature (357)..(357): n is a, c, g, or t
agacgagtgctgagccaagaacctcctagaggctgtccctggacctggagctgcaggcatcagagaaccagccctgctcacgccatgcccgcccccgccttccctcttccctcttccctctccctgcccagccctcccttccttcctctgccggcaaggcagggacccacagtggctgcctgcctccgggagggaaggannnnnagggagggtgggtgggtgggaggggnccttncctnccagggaatgtgactctcccaggccccagaatagctcctggacccaagcccaaggcccagcctgggacaaggctccgagggtcggctggccggagctatttttacctcccgcctcccntgctggtccccccacctgacgtcttgctgcagagtctgacactggattcccccccctcaccccgcccctggtcccactcctgcccccgccctacctccgccccaccccatcatctgtggacactggagtctggaataaatgc

SEQ ID NO: 974 - DNA, 419 bp, Homo sapiens
  misc_feature (26)..(29): n is a, c, g, or t
  misc_feature (44)..(58): n is a, c, g, or t
  misc_feature (63)..(139): n is a, c, g, or t
ttgctgaagagcaagcagagggtccnnnncgcctgctgtacaannnnnnnnnnnnnnncatcnnnnnnnnnnnnnnnnnnnnnnnnnnnnnnnnnnnnnnnnnnnnnnnnnnnnnnnnnnnnnnnnnnnnnnnnnnnnnaggcctctccctctgtcagttccagaacttctccctccatgacccactctatgggaaactcttcagcacctacctgcgccccccacacacctctcgaggcacctcccagacaccaaatgcctcatccccaggcaaccccactgctctggccaatgggactgtgcaagcacccaagcagaagggagactgagtgcctcagcctctcaccccctcctcctcagggcagcgctaggggcctcccctatgcctcagccccatctctgctcctgtttgaattttg

SEQ ID NO: 975 - DNA, 427 bp, Homo sapiens
  misc_feature (64)..(64): n is a, c, g, or t
  misc_feature (101)..(101): n is a, c, g, or t
  misc_feature (120)..(121): n is a, c, g, or t
  misc_feature (272)..(326): n is a, c, g, or t
cgcatcaagggcataagttattgtgaacgtttttgccaatcactgctcaacagccctgctagantttgtatgatgctgaattattatgcagactaattccncccagttgagacacaccanncttgttcacttgtatttattgaaactgtggattcttgcccgtgctgtcccttgtatttactttaagcactgatcacttatcattcattcggtatggttttccctgtcccttgtacacattctggtatgaatttgtaaaaataacctgctannnnnnnnnnnnnnnnnnnnnnnnnnnnnnnnnnnnnnnnnnnnnnnnnnnnnnncgtgcccaactgaggaacaggagaagaaatcaccaatttgggctctcagagctaagacacacttattgattctgttgcacattttgcactggtttatggcg

SEQ ID NO: 976 - DNA, 457 bp, Homo sapiens
  misc_feature (64)..(95): n is a, c, g, or t
  misc_feature (104)..(104): n is a, c, g, or t
  misc_feature (226)..(226): n is a, c, g, or t
  misc_feature (344)..(344): n is a, c, g, or t
  misc_feature (387)..(402): n is a, c, g, or t
acagacttggcaagggaccccctggttctgagccagtagctgccatctggaaattcctcttttnnnnnnnnnnnnnnnnnnnnnnnnnnnnnnnnctcccaggnacccgctgaatttctgaggccttgcttaaagctcagaagtggtttaggcatttggaaaatctggttcacatcataaagaacttgatttgaaatgttttctatagaaacaagtgctaagtgtnaccgtattatacttgatgttggtcatttctcagtcctatttctcagttctattattttagaacctagtcagttctttaagattataactggtcctacattaaaataatgcttctcgangtcagattttacctgtttgctgctgagaacatctctgcctaannnnnnnnnnnnnnnncttcagttcaacatgcttccttagcttttcatagttgtctgacatttccatgaaa

SEQ ID NO: 977 - DNA, 493 bp, Homo sapiens
  misc_feature (28)..(28): n is a, c, g, or t
  misc_feature (44)..(44): n is a, c, g, or t
  misc_feature (53)..(53): n is a, c, g, or t
  misc_feature (73)..(74): n is a, c, g, or t
  misc_feature (88)..(88): n is a, c, g, or t
  misc_feature (95)..(96): n is a, c, g, or t
  misc_feature (98)..(98): n is a, c, g, or t
  misc_feature (108)..(123): n is a, c, g, or t
  misc_feature (351)..(351): n is a, c, g, or t
  misc_feature (364)..(378): n is a, c, g, or t
gcgcagcttttctcgctgcagagggagnagctgcgggcggtgancccgagganggggcacgtgtgtacagccnngtcaccgtgcagcnctcgctnntngaggacaaannnnnnnnnnnnnnnntggaggcagtgatggagaagcaaaagaagaaggtggaaggcgaggtggaaatggaggtcatttgacctgccaggcgcccttcgcaaagagtgacgaggccccgtgggagaacggactcctcagactctccccaatagcggaagtcgatcttctgaaggatggccaatctgctccggccctggtcttcccccatcccggtggacagacttaacgatccttgctgcagtncctccggagaggnnnnnnnnnnnnnnngagtggggagggcgtggagacagtctacggaaagcgctagcagacccccgagagggtgcagtggagccctgagcattgtaatatgcggcccagcctataaacagcctccgtgctt

SEQ ID NO: 978 - DNA, 1536 bp, Homo sapiens
gtgacgcgaggctctgcggagaccaggagtcagactgtaggacgacctcgggtcccacgtgtccccggtactcgccggccggagcccccggcttcccggggccgggggaccttagcggcacccacacacagcctactttccaagcggagccatgtctggtaacggcaatgcggctgcaacggcggaagaaaacagcccaaagatgagagtgattcgcgtgggtacccgcaagagccagcttgctcgcatacagacggacagtgtggtggcaacattgaaagcctcgtaccctggcctgcagtttgaaatcattgctatgtccaccacaggggacaagattcttgatactgcactctctaagattggagagaaaagcctgtttaccaaggagcttgaacatgccctggagaagaatgaagtggacctggttgttcactccttgaaggacctgcccactgtgcttcctcctggcttcaccatcggagccatctgcaagcgggaaaaccctcatgatgctgttgtctttcacccaaaatttgttgggaagaccctagaaaccctgccagagaagagtgtggtgggaaccagctccctgcgaagagcagcccagctgcagagaaagttcccgcatctggagttcaggagtattcggggaaacctcaacacccggcttcggaagctggacgagcagcaggagttcagtgccatcatcctggcaacagctggcctgcagcgcatgggctggcacaaccgggtggggcagatcctgcaccctgaggaatgcatgtatgctgtgggccagggggccttgggcgtggaagtgcgagccaaggaccaggacatcttggatctggtgggtgtgctgcacgatcccgagactctgcttcgctgcatcgctgaaagggccttcctgaggcacctggaaggaggctgcagtgtgccagtagccgtgcatacagctatgaaggatgggcaactgtacctgactggaggagtctggagtctagacggctcagatagcatacaagagaccatgcaggctaccatccatgtccctgcccagcatgaagatggccctgaggatgacccacagttggtaggcatcactgctcgtaacattccacgagggccccagttggctgcccagaacttgggcatcagcctggccaacttgttgctgagcaaaggagccaaaaacatcctggatgttgcacggcagcttaacgatgcccattaactggtttgtggggcacagatgcctgggttgctgctgtccagtgcctacatcccgggcctcagtgccccattctcactgctatctggggagtgattaccccgggagactgaactgcagggttcaagccttccagggatttgcctcaccttggggccttgatgactgccttgcctcctcagtatgtgggggcttcatctctttagagaagtccaagcaacagcctttgaatgtaaccaatcctactaataaaccagttctgaaggtaaaaaaaaaaaaaaaaaaaaaaaaaaaaaaaaaaa

SEQ ID NO: 979 - DNA, 1524 bp, Homo sapiens
agcagacagaggactctcattaaggaaggtgtcctgtgccctgaccctacaagatgccaagagaagatgctcacttcatctatggttaccccaagaaggggcacggccactcttacaccacggctgaagaggccgctgggatcggcatcctgacagtgatcctgggagtcttactgctcatcggctgttggtattgtagaagacgaaatggatacagagccttgatggataaaagtcttcatgttggcactcaatgtgccttaacaagaagatgcccacaagaagggtttgatcatcgggacagcaaagtgtctcttcaagagaaaaactgtgaacctgtggttcccaatgctccacctgcttatgagaaactctctgcagaacagtcaccaccaccttattcaccttaagagccagcgagacacctgagacatgctgaaattatttctctcacacttttgcttgaatttaatacagacatctaatgttctcctttggaatggtgtaggaaaaatgcaagccatctctaataataagtcagtgttaaaattttagtaggtccgctagcagtactaatcatgtgaggaaatgatgagaaatattaaattgggaaaactccatcaataaatgttgcaatgcatgatactatctgtgccagaggtaatgttagtaaatccatggtgttattttctgagagacagaattcaagtgggtattctggggccatccaatttctctttacttgaaatttggctaataacaaactagtcaggttttcgaaccttgaccgacatgaactgtacacagaattgttccagtactatggagtgctcacaaaggatacttttacaggttaagacaaagggttgactggcctatttatctgatcaagaacatgtcagcaatgtctctttgtgctctaaaattctattatactacaataatatattgtaaagatcctatagctctttttttttgagatggagtttcgcttttgttgcccaggctggagtgcaatggcgcgatcttggctcaccataacctccgcctcccaggttcaagcaattctcctgccttagcctcctgagtagctgggattacaggcgtgcgccactatgcctgactaattttgtagttttagtagagacggggtttctccatgttggtcaggctggtctcaaactcctgacctcaggtgatctgcccgcctcagcctcccaaagtgctggaattacaggcgtgagccaccacgcctggctggatcctatatcttaggtaagacatataacgcagtctaattacatttcacttcaaggctcaatgctattctaactaatgacaagtattttctactaaaccagaaattggtagaaggatttaaataagtaaaagctactatgtactgccttagtgctgatgcctgtgtactgccttaaatgtacctatggcaatttagctctcttgggttcccaaatccctctcacaagaatgtgcagaagaaatcataaaggatcagagattctg

SEQ ID NO: 980 - DNA, 2026 bp, Homo sapiens
ctcgagatggatctggtgctaaaaagatgccttcttcatttggctgtgataggtgctttgctggctgtgggggctacaaaagtacccagaaaccaggactggcttggtgtctcaaggcaactcagaaccaaagcctggaacaggcagctgtatccagagtggacagaagcccagagacttgactgctggagaggtggtcaagtgtccctcaaggtcagtaatgatgggcctacactgattggtgcaaatgcctccttctctattgccttgaacttccctggaagccaaaaggtattgccagatgggcaggttatctgggtcaacaataccatcatcaatgggagccaggtgtggggaggacagccagtgtatccccaggaaactgacgatgcctgcatcttccctgatggtggaccttgcccatctggctcttggtctcagaagagaagctttgtttatgtctggaagacctggggccaatactggcaagttctagggggcccagtgtctgggctgagcattgggacaggcagggcaatgctgggcacacacaccatggaagtgactgtctaccatcgccggggatcccggagctatgtgcctcttgctcattccagctcagccttcaccattactgaccaggtgcctttctccgtgagcgtgtcccagttgcgggccttggatggagggaacaagcacttcctgagaaatcagcctctgacctttgccctccagctccatgaccccagtggctatctggctgaagctgacctctcctacacctgggactttggagacagtagtggaaccctgatctctcgggcacttgtggtcactcatacttacctggagcctggcccagtcactgcccaggtggtcctgcaggctgccattcctctcacctcctgtggctcctccccagttccaggcaccacagatgggcacaggccaactgcagaggcccctaacaccacagctggccaagtgcctactacagaagttgtgggtactacacctggtcaggcgccaactgcagagccctctggaaccacatctgtgcaggtgccaaccactgaagtcataagcactgcacctgtgcagatgccaactgcagagagcacaggtatgacacctgagaaggtgccagtttcagaggtcatgggtaccacactggcagagatgtcaactccagaggctacaggtatgacacctgcagaggtatcaattgtggtgctttctggaaccacagctgcacaggtaacaactacagagtgggtggagaccacagctagagagctacctatccctgagcctgaaggtccagatgccagctcaatcatgtctacggaaagtattacaggttccctgggccccctgctggatggtacagccaccttaaggctggtgaagagacaagtccccctggattgtgttctgtatcgatatggttccttttccgtcaccctggacattgtccagggtattgaaagtgccgagatcctgcaggctgtgccgtccggtgagggggatgcatttgagctgactgtgtcctgccaaggcgggctgcccaaggaagcctgcatggagatctcatcgccagggtgccagccccctgcccagcggctgtgccagcctgtgctacccagcccagcctgccagctggttctgcaccagatactgaagggtggctcggggacatactgcctcaatgtgtctctggctgataccaacagcctggcagtggtcagcacccagcttatcatgcctggtcaagaagcagggggccttgggcaggttccgctgatcgtgggcatcttgctggtgttgatggctgtggtccttgcatctctgatatataggcgcagacttatgaagcaagacttctccgtaccccagttgccacatagcagcagtcactggctgcgtctaccccgcatcttctgctcttgtcccattggtgagaatagccccctcctcagtgggcagcaggtctgagtactctcatatgatgctgtgattgcggccg

SEQ ID NO: 981 - DNA, 4204 bp, Homo sapiens
acgcaggcagtgatgtcacccagaccacaccccttcccccaatgccacttcagggggtactcagagtcagagacttggtctgaggggagcagaagcaatctgcagaggatggcggtccaggctcagccaggcatcaacttcaggaccctgagggatgaccgaaggccccgcccacccacccccaactcccccgaccccaccaggatctacagcctcaggacccccgtcccaatccttaccccttgccccatcaccatcttcatgcttacctccacccccatccgatccccatccaggcagaatccagttccacccctgcccggaacccagggtagtaccgttgccaggatgtgacgccactgacttgcgcattggaggtcagaagaccgcgagattctcgccctgagcaacgagcgacggcctgacgtcggcggagggaagccggcccaggctcggtgaggaggcaaggtaagacgctgagggaggactgaggcgggcctcacctcagacagagggcctcaaataatccagtgctgcctctgctgccgggcctgggccaccccgcaggggaagacttccaggctgggtcgccactacctcaccccgccgacccccgccgctttagccacggggaactctggggacagagcttaatgtggccagggcagggctggttagaagaggtcagggcccacgctgtggcaggaatcaaggtcaggaccccgagagggaactgagggcagcctaaccaccaccctcaccaccattcccgtcccccaacacccaaccccacccccatcccccattcccatccccacccccacccctatcctggcagaatccgggctttgcccctggtatcaagtcacggaagctccgggaatggcggccaggcacgtgagtcctgaggttcacatctacggctaagggagggaaggggttcggtatcgcgagtatggccgttgggaggcagcgaaagggcccaggcctcctggaagacagtggagtcctgaggggacccagcatgccaggacagggggcccactgtacccctgtctcaaaccgaggcaccttttcattcggctacgggaatcctagggatgcagacccacttcagcagggggttggggcccagccctgcgaggagtcatggggaggaagaagagggaggactgaggggaccttggagtccagatcagtggcaaccttgggctgggggatgctgggcacagtggccaaatgtgctctgtgctcattgcgccttcagggtgaccagagagttgagggctgtggtctgaagagtgggacttcaggtcagcagagggaggaatcccaggatctgcagggcccaaggtgtacccccaaggggcccctatgtggtggacagatgcagtggtcctaggatctgccaagcatccaggtgaagagactgagggaggattgagggtacccctgggacagaatgcggactgggggccccataaaaatctgccctgctcctgctgttacctcagagagcctgggcagggctgtcagctgaggtccctccattatcctaggatcactgatgtcagggaaggggaagccttggtctgagggggctgcactcagggcagtagagggaggctctcagaccctactaggagtggaggtgaggaccaagcagtctcctcacccagggtacatggacttcaataaatttggacatctctcgttgtcctttccgggaggacctgggaatgtatggccagatgtgggtcccctcatgtttttctgtaccatatcaggtatgtgagttcttgacatgagagattctcaggccagcagaagggagggattaggccctataaggagaaaggtgagggccctgagtgagcacagaggggatcctccaccccagtagagtggggacctcacagagtctggccaaccctcctgacagttctgggaatccgtggctgcgtttgctgtctgcacattgggggcccgtggattcctctcccaggaatcaggagctccaggaacaaggcagtgaggacttggtctgaggcagtgtcctcaggtcacagagtagagggggctcagatagtgccaacggtgaaggtttgccttggattcaaaccaagggccccacctgccccagaacacatggactccagagcgcctggcctcaccctcaatactttcagtcctgcagcctcagcatgcgctggccggatgtaccctgaggtgccctctcacttcctccttcaggttctgaggggacaggctgacctggaggaccagaggcccccggaggagcactgaaggagaagatctgtaagtaagcctttgttagagcctccaaggttccattcagtactcagctgaggtctctcacatgctccctctctccccaggccagtgggtctccattgcccagctcctgcccacactcccgcctgttgccctgaccagagtcatcatgcctcttgagcagaggagtcagcactgcaagcctgaagaaggccttgaggcccgaggagaggccctgggcctggtgggtgcgcaggctcctgctactgaggagcaggaggctgcctcctcctcttctactctagttgaagtcaccctgggggaggtgcctgctgccgagtcaccagatcctccccagagtcctcagggagcctccagcctccccactaccatgaactaccctctctggagccaatcctatgaggactccagcaaccaagaagaggaggggccaagcaccttccctgacctggagtccgagttccaagcagcactcagtaggaaggtggccgagttggttcattttctgctcctcaagtatcgagccagggagccggtcacaaaggcagaaatgctggggagtgtcgtcggaaattggcagtatttctttcctgtgatcttcagcaaagcttccagttccttgcagctggtctttggcatcgagctgatggaagtggaccccatcggccacttgtacatctttgccacctgcctgggcctctcctacgatggcctgctgggtgacaatcagatcatgcccaaggcaggcctcctgataatcgtcctggccataatcgcaagagagggcgactgtgcccctgaggagaaaatctgggaggagctgagtgtgttagaggtgtttgaggggagggaagacagtatcttgggggatcccaagaagctgctcacccaacatttcgtgcaggaaaactacctggagtaccggcaggtccccggcagtgatcctgcatgttatgaattcctgtggggtccaagggccctcgttgaaaccagctatgtgaaagtcctgcaccatatggtaaagatcagtggaggacctcacatttcctacccacccctgcatgagtgggttttgagagagggggaagagtgagtctgagcacgagttgcagccagggccagtgggagggggtctgggccagtgcaccttccggggccgcatcccttagtttccactgcctcctgtgacgtgaggcccattcttcactctttgaagcgagcagtcagcattcttagtagtgggtttctgttctgttggatgactttgagattattctttgtttcctgttggagttgttcaaatgttccttttaacggatggttgaatgagcgtcagcatccaggtttatgaatgacagtagtcacacatagtgctgtttatatagtttaggagtaagagtcttgttttttactcaaattgggaaatccattccattttgtgaattgtgacataataatagcagtggtaaaagtatttgcttaaaattgtgagcgaattagcaataacatacatgagataactcaagaaatcaaaagatagttgattcttgccttgtacctcaatctattctgtaaaattaaacaaatatgcaaaccaggatttccttgacttctttgagaatgcaagcgaaattaaatctgaataaataattcttcctcttcactggctcgtttcttttccgttcactcagcatctgctctgtgggaggccctgggttagtagtggggatgctaaggtaagccagactcacgcctacccatagggctgtagagcctaggacctgcagtcatataattaaggtggtgagaagtcctgtaagatgtagaggaaatgtaagagaggggtgagggtgtggcgctccgggtgagagtagtggagtgtcagtgc

SEQ ID NO: 982 - DNA, 23 bp, Homo sapiens
tgtgtctctggctgataccaaca

SEQ ID NO: 983 - DNA, 23 bp, Homo sapiens
ttcttgaccaggcatgataagct

SEQ ID NO: 984 - DNA, 15 bp, Homo sapiens
ctggcagtggtcagc

SEQ ID NO: 985 - DNA, 22 bp, Homo sapiens
ctgcttcgctgcatcgctgaaa

SEQ ID NO: 986 - DNA, 22 bp, Homo sapiens
cagactcctccagtcaggtaca

SEQ ID NO: 987 - DNA, 30 bp, Homo sapiens
cctgaggcacctggaaggaggctgcagtgt

SEQ ID NO: 988 - DNA, 2384 bp, Homo sapiens
tattgagttcttcaaacattgtagcctctttatggtctctgagaaataactaccttaaacccataatctttaatacttcctaaactttcttaataagagaagctctattcctgacactacctctcatttgcaaggtcaaatcatcattagttttgtagtctattaactgggtttgcttaggtcaggcattattattactaaccttattgttaatattctaaccataagaattaaactattaatggtgaatagagtttttcactttaacataggcctatcccactggtgggatacgagccaattcgaaagaaaagtcagtcatgtgcttttcagaggatgaaagcttaagataaagactaaaagtgtttgatgctggaggtgggagtggtattatataggtctcagccaagacatgtgataatcactgtagtagtagctggaaagagaaatctgtgactccaattagccagttcctgcagaccttgtgaggactagaggaagaatgctcctggctgttttgtactgcctgctgtggagtttccagacctccgctggccatttccctagagcctgtgtctcctctaagaacctgatggagaaggaatgctgtccaccgtggagcggggacaggagtccctgtggccagctttcaggcagaggttcctgtcagaatatccttctgtccaatgcaccacttgggcctcaatttcccttcacaggggtggatgaccgggagtcgtggccttccgtcttttataataggacctgccagtgctctggcaacttcatgggattcaactgtggaaactgcaagtttggcttttggggaccaaactgcacagagagacgactcttggtgagaagaaacatcttcgatttgagtgccccagagaaggacaaattttttgcctacctcactttagcaaagcataccatcagctcagactatgtcatccccatagggacctatggccaaatgaaaaatggatcaacacccatgtttaacgacatcaatatttatgacctctttgtctggatgcattattatgtgtcaatggatgcactgcttgggggatctgaaatctggagagacattgattttgcccatgaagcaccagcttttctgccttggcatagactcttcttgttgcggtgggaacaagaaatccagaagctgacaggagatgaaaacttcactattccatattgggactggcgggatgcagaaaagtgtgacatttgcacagatgagtacatgggaggtcagcaccccacaaatcctaacttactcagcccagcatcattcttctcctcttggcagattgtctgtagccgattggaggagtacaacagccatcagtctttatgcaatggaacgcccgagggacctttacggcgtaatcctggaaaccatgacaaatccagaaccccaaggctcccctcttcagctgatgtagaattttgcctgagtttgacccaatatgaatctggttccatggataaagctgccaatttcagctttagaaatacactggaaggatttgctagtccacttactgggatagcggatgcctctcaaagcagcatgcacaatgccttgcacatctatatgaatggaacaatgtcccaggtacagggatctgccaacgatcctatcttccttcttcaccatgcatttgttgacagtatttttgagcagtggctccgaaggcaccgtcctcttcaagaagtttatccagaagccaatgcacccattggacataaccgggaatcctacatggttccttttataccactgtacagaaatggtgatttctttatttcatccaaagatctgggctatgactatagctatctacaagattcagacccagactcttttcaagactacattaagtcctatttggaacaagcgagtcggatctggtcatggctccttggggcggcgatggtaggggccgtcctcactgccctgctggcagggcttgtgagcttgctgtgtcgtcacaagagaaagcagcttcctgaagaaaagcagccactcctcatggagaaagaggattaccacagcttgtatcagagccatttataaaaggcttaggcaatagagtagggccaaaaagcctgacctcactctaactcaaagtaatgtccaggttcccagagaatatctgctggtatttttctgtaaagaccatttgcaaaattgtaacctaatacaaagtgtagccttcttccaactcaggtagaacacacctgtctttgtcttgctgttttcactcagcccttttaacattttcccctaagcccatatgtctaaggaaaggatgctatttggtaatgaggaactgttatttgtatgtgaattaaagtgctcttatttt

SEQ ID NO: 989 - DNA, 1204 bp, Homo sapiens; identical to SEQ ID NO: 1

SEQ ID NO: 990 - DNA, 29 bp, Homo sapiens
ctttagaaatacactggaaggatttgcta

SEQ ID NO: 991 - DNA, 20 bp, Homo sapiens
cattgtgcatgctgctttga

SEQ ID NO: 992 - DNA, 27 bp, Homo sapiens
tccacttactgggatagcggatgcctc

SEQ ID NO: 993 - DNA, 25 bp, Homo sapiens
acttcatctatggttaccccaagaa

SEQ ID NO: 994 - DNA, 17 bp, Homo sapiens
tcccagcggcctcttca

SEQ ID NO: 995 - DNA, 23 bp, Homo sapiens
cacggccactcttacaccacggc

SEQ ID NO: 996 - DNA, 25 bp, Homo sapiens
cttaaggctggtgaagagacaagtc

SEQ ID NO: 997 - DNA, 23 bp, Homo sapiens
caggatctcggcactttcaatac

SEQ ID NO: 998 - DNA, 28 bp, Homo sapiens
tcgatatggttccttttccgtcaccctg

SEQ ID NO: 999 - DNA, 20 bp, Homo sapiens
attcgaacaccgacctcgtc

SEQ ID NO: 1000 - DNA, 16 bp, Homo sapiens
cgcaggtgcaggtggc

SEQ ID NO: 1001 - DNA, 24 bp, Homo sapiens
gatactcacgccagaagtgcggct

1. A method of identifying a melanoma comprising the steps of
a. obtaining a tissue sample; and
b. measuring the expression levels in the sample of genes encoding mRNA corresponding to
PLAB (SEQ ID NO: 1) and LlCAM (SEQ ID NO: 2); or
PLAB, LlCAM and NTRK3 (SEQ ID NO: 3)
wherein the gene expression levels above pre-determined cut-off levels are indicative of the presence of a melanoma in the sample.

2. The method of claim 1 further comprising measuring the expression level of a gene encoding tyrosinase (SEQ ID NO: 999).

3. The method of claim 1 further comprising measuring the expression level of a gene constitutively expressed in the sample.

4. The method of claim 3 wherein the gene encodes PBGD (SEQ ID NOs: 979).

5. The method of claim 1 further comprising measuring the expression levels of at least one gene encoding an mRNA corresponding to a psid selected from the group consisting of SEQ ID NOs: 29-978.

6. The method of claim 1, 2, 3, 4 or 5 wherein the sample is obtained from a lymph node.

7. The method of claim 6 wherein the lymph node is a sentinel lymph node.

8. The method of claim 1, 2, 3, 4 or 5 wherein the sample is obtained from a biopsy.

9. The method of claim 1, 2, 3, 4 or 5 wherein the method is performed intra-operatively.

10. The method of claim 1, 2, 3, 4 or 5 wherein the melanoma is a micrometastasis.

11. The method of claim 1, 2, 3, 4 or 5 wherein the specificity and sensitivity are sufficient to detect metastasis of melanoma.

12. The method of claim 11, wherein the specificity is at least 95% based on a comparison of hematoxylin and eosin (H&E) and immunohistochemical (IHC) negative nodes.

13. The method of claim 11 wherein the specificity is at least 97% based on a comparison of H&E and IHC negative nodes.

14. The method of claim 11 wherein the specificity is at least 99% based on a comparison of H&E and IHC negative nodes.

15. The method of claim 11 wherein the sensitivity is at least at least 80% based on a comparison of hematoxylin and eosin (H&E) and immunohistochemical (IHC) positive nodes.

16. The method of claim 11 wherein the sensitivity is at least 85% based on a comparison of H&E and IHC positive nodes.

17. The method of claim 11 wherein the sensitivity is at least 90% based on a comparison of H&E and IHC positive nodes.

18. The method of claim 11 wherein the specificity and sensitivity are at least 97% based on a comparison of H&E and IHC negative nodes and at least 85% based on a comparison of H&E and IHC positive nodes, respectively.

19. The method of claim 1, 2, 3, 4 or 5 wherein the pre-determined cut-off levels are at least two-fold over-expression in tissue having metastatic melanoma relative to benign melanocyte or normal tissue.

20. The method of claim 1, 2, 3, 4 or 5 wherein gene expression is measured on a microarray or gene chip.

21. The method of claim 1, 2, 3, 4 or 5 wherein gene expression is determined by nucleic acid amplification conducted by polymerase chain reaction (PCR) of RNA extracted from the sample.

22. The method of claim 21 wherein the PCR products comprise at least one of SEQ ID NOs: 25-28.

23. The method of claim 22 wherein the PCR products include fluorophores.

24. The method of claim 23 wherein the fluorophores are selected from the group consisting of Fam, Texas Red, CaI Red, Cl, CyS, and Cy3.

25. The method of claim 24 wherein the fluorophores correspond to PLAB: Fam; LlCAM: Texas Red or CaI Red, tyrosinase: Cl; PBGD: Cy5, where applicable.

26. The method of claim 21 wherein said PCR is reverse transcription polymerase chain reaction (RT-PCR).

27. The method of claim 26, wherein the RT-PCR further comprises one or more internal control reagents.

28. The method of claim 21 wherein RNA is extracted from the sample by:
a. homogenizing the sample to produce an homogenate;
b. contacting the homogenate with a substrate containing, or to which is affixed, an RNA-binding material;
c. allowing the RNA to bind to the RNA binding material;
d. washing the substrate under conditions sufficient to remove any contaminants, interferents and un-bound RNA; and
e. eluting bound RNA from the substrate.

29. The method of claim 1, 2, 3, 4 or 5 further comprising reducing melanin in the sample.

30. The method of claim 29 wherein melanin concentration is reduced by homogenizing the sample to produce an homogenate and passing the homogenate through a matrix to which melanin adheres, bonds, or is affixed.

31. The method of claim 30 wherein said matrix comprises polymeric beads.

32. The method of claim 30 wherein said matrix comprises silica.

33. The method of claim 28 wherein the RNA is extracted in less than about 8 minutes.

34. The method of claim 28 wherein the RNA is extracted in less than about 6 minutes.

35. The method of claim 1, 2, 3, 4 or 5 wherein gene expression is measured by measuring the protein encoded by the gene.

36. The method of claim 35 wherein the protein is detected by an antibody specific to the protein.

37. A method of identifying a melanoma comprising the steps of
a. obtaining a tissue sample; and
b. measuring the expression levels in the sample of genes encoding niRNA recognized by the primer/probe sets selected from the group consisting of SEQ ID NOs: 4-6 or SEQ ID NOs: 7-9 and SEQ ID NOs: 10-12 or SEQ ID NOs: 13-15; or
SEQ ID NOs: 4-6 or SEQ ID NOs: 7-9 and SEQ ID NOs: 10-12 or SEQ ID NOs: 13-15 and SEQ ID NOs: 16-18
wherein the gene expression levels above pre-determined cut-off levels are indicative of the presence of a melanoma in the sample.

38. The method of claim 37 further comprising measuring the expression level of a gene encoding tyrosinase (SEQ ID NO: 999).

39. The method of claim 37 further comprising measuring the expression level of a gene constitutively expressed in the sample.

40. The method of claim 39 wherein the gene encodes PBGD (SEQ ID NO: 979).

41. The method of claim 37 further comprising measuring the expression levels of at least one gene encoding an mRNA corresponding to a psid selected from the group consisting of SEQ ID NOs: 29-978.

42. The method of claim 37, 38, 39, 40 or 41 wherein the sample is obtained from a lymph node.

43. The method of claim 42 wherein the lymph node is a sentinel lymph node.

44. The method of claim 37, 38, 39, 40 or 41 wherein the sample is obtained from a biopsy.

45. The method of claim 37, 38, 39, 40 or 41 wherein the method is performed intra-operatively.

46. The method of claim 37, 38, 39, 40 or 41 wherein the melanoma is a micrometastasis.

47. The method of claim 37, 38, 39, 40 or 41 wherein the specificity and sensitivity are sufficient to detect metastasis of melanoma.

48. The method of claim 47, wherein the specificity is at least 95% based on a comparison of hematoxylin and eosin (H&E) and immunohistochemical (IHC) negative nodes.

49. The method of claim 47 wherein the specificity is at least 97% based on a comparison of H&E and IHC negative nodes.

50. The method of claim 47 wherein the specificity is at least 99% based on a comparison of H&E and IHC negative nodes.

51. The method of claim 47 wherein the sensitivity is at least at least 80% based on a comparison of hematoxylin and eosin (H&E) and immunohistochemical (IHC) positive nodes.

52. The method of claim 47 wherein the sensitivity is at least 85% based on a comparison of H&E and IHC positive nodes.

53. The method of claim 47 wherein the sensitivity is at least 90% based on a comparison of H&E and IHC positive nodes.

54. The method of claim 47 wherein the specificity and sensitivity are at least 97% based on a comparison of H&E and IHC negative nodes and at least 85% based on a comparison of H&E and IHC positive nodes, respectively.

55. The method of claim 37, 38, 39, 40 or 41 wherein the pre-determined cut-off levels are at least two-fold over-expression in tissue having metastatic melanoma relative to benign melanocyte or normal tissue.

56. The method of claim 37, 38, 39, 40 or 41 wherein gene expression is measured on a microarray or gene chip.

57. The method of claim 37, 38, 39, 40 or 41 wherein gene expression is determined by nucleic acid amplification conducted by polymerase chain reaction (PCR) of RNA extracted from the sample.

58. The method of claim 57 wherein the PCR products comprise at least one of SEQ ID NOs: 25-28.

59. The method of claim 57 wherein the PCR products include fluorophores.

60. The method of claim 59 wherein the fluorophores are selected from the group consisting of Fam, Texas Red, CaI Red, Cl, Cy5 and Cy3.

61. The method of claim 60 wherein the fluorophores correspond to PLAB: Fam; LlCAM: Texas Red or CaI Red, tyrosinase: Cl; PBGD: Cy5, where applicable.

62. The method of claim 57 wherein said PCR is reverse transcription polymerase chain reaction (RT-PCR).

63. The method of claim 62, wherein the RT-PCR further comprises one or more internal control reagents.

64. The method of claim 57 wherein RNA is extracted from the sample by:
a. homogenizing the sample to produce an homogenate;
b. contacting the homogenate with a substrate containing, or to which is affixed, an RNA-binding material;
c. allowing the RNA to bind to the RNA binding material;
d. washing the substrate under conditions sufficient to remove any contaminants, interferents and un-bound RNA; and
e. eluting bound RNA from the substrate.

65. The method of claim 37, 38, 39, 40 or 41 further comprising reducing melanin in the sample.

66. The method of claim 65 wherein melanin concentration is reduced by homogenizing the sample to produce an homogenate and passing the homogenate through a matrix to which melanin adheres, bonds, or is affixed.

67. The method of claim 66 wherein the matrix comprises polymeric beads.

68. The method of claim 66 wherein the matrix comprises silica.

69. The method of claim 64 wherein the RNA is extracted in less than about 8 minutes.

70. The method of claim 64 wherein the RNA is extracted in less than about 6 minutes.

71. The method of claim 37, 38, 39, 40 or 41 wherein gene expression is measured by measuring the protein encoded by the gene.

72. The method of claim 71 wherein the protein is detected by an antibody specific to the protein.

73. A method of distinguishing a malignant melanocyte from a benign melanocyte comprising the steps of
a. obtaining a tissue sample; and
b. measuring the expression levels in the sample of genes encoding
PLAB (SEQ ID NO: 1) and LlCAM (SEQ ID NO: 2); or
PLAB, LlCAM and NTRK3 (SEQ ID NO: 3)
wherein the gene expression levels above pre-determined cut-off levels are indicative of the presence of a malignant melanocyte in the sample.

74. The method of claim 73 further comprising measuring the expression level of a gene encoding tyrosinase (SEQ ID NO: 999).

75. The method of claim 73 further comprising measuring the expression level of a gene constitutively expressed in the sample.

76. The method of claim 75 wherein the gene encodes PBGD (SEQ ID NO: 979).

77. The method of claim 73 further comprising measuring the expression levels of at least one gene encoding an mRNA corresponding to a psid selected from the group consisting of SEQ ID NOs: 29-978.

78. The method of claim 73, 74, 75, 76 or 77 wherein the sample is obtained from a lymph node.

79. The method of claim 78 wherein the lymph node is a sentinel lymph node.

80. The method of claim 73, 74, 75, 76 or 77 wherein the sample is obtained from a biopsy.

81. The method of claim 73, 74, 75, 76 or 77 wherein the method is performed intra-operatively.

82. The method of claim 73, 74, 75, 76 or 77 wherein the melanoma is a micrometastasis.

83. The method of claim 73, 74, 75, 76 or 77 wherein the specificity and sensitivity are sufficient to detect metastasis of melanoma.

84. The method of claim 83, wherein the specificity is at least 95% based on a comparison of hematoxylin and eosin (H&E) and immunohistochemical (IHC) negative nodes.

85. The method of claim 83 wherein the specificity is at least 97% based on a comparison of H&E and IHC negative nodes.

86. The method of claim 83 wherein the specificity is at least 99% based on a comparison of H&E and IHC negative nodes.

87. The method of claim 83 wherein the sensitivity is at least at least 80% based on a comparison of hematoxylin and eosin (H&E) and immunohistochemical (IHC) positive nodes.

88. The method of claim 83 wherein the sensitivity is at least 85% based on a comparison of H&E and IHC positive nodes.

89. The method of claim 83 wherein the sensitivity is at least 90% based on a comparison of H&E and IHC positive nodes.

90. The method of claim 83 wherein the specificity and sensitivity are at least 97% based on a comparison of H&E and IHC negative nodes and at least 85% based on a comparison of H&E and IHC positive nodes, respectively.

91. The method of claim 73, 74, 75, 76 or 77 wherein the pre-determined cut-off levels are at least two-fold over-expression in tissue having metastatic melanoma relative to benign melanocyte or normal tissue.

92. The method of claim 73, 74, 75, 76 or 77 wherein gene expression is measured on a microarray or gene chip.

93. The method of claim 73, 74, 75, 76 or 77 wherein gene expression is determined by nucleic acid amplification conducted by polymerase chain reaction (PCR) of RNA extracted from the sample.

94. The method of claim 93 wherein the PCR products comprise at least one of SEQ ID NOs: 25-28.

95. The method of claim 93 wherein the PCR products include fluorophores.

96. The method of claim 95 wherein the fluorophores are selected from the group consisting of Fam, Texas Red, CaI Red, Cl, Cy5 and Cy3.

97. The method of claim 96 wherein the PCR product, if present, is identified by the fluorescence pattern of PLAB: Fam; LlCAM: Texas Red or CaI Red, tyrosinase: Cl; PBGD: Cy5, where applicable.

98. The method of claim 93 wherein the PCR is reverse transcription polymerase chain reaction (RT-PCR).

99. The method of claim 98, wherein the RT-PCR further comprises one or more internal control reagents.

100. The method of claim 93 wherein RNA is extracted from the sample by:
a. homogenizing the sample to produce an homogenate;
b. contacting the homogenate with a substrate containing, or to which is affixed, an RNA-binding material;
c. allowing the RNA to bind to the RNA binding material;
d. washing the substrate under conditions sufficient to remove any contaminants, interferents and un-bound RNA; and
e. eluting bound RNA from the substrate.

101. The method of claim 73, 74, 75, 76 or 77 further comprising reducing melanin in the sample.

102. The method of claim 101 wherein melanin concentration is reduced by homogenizing the sample to produce an homogenate and passing the homogenate through a matrix to which melanin adheres, bonds, or is affixed.

103. The method of claim 102 wherein the matrix comprises polymeric beads.

104. The method of claim 102 wherein the matrix comprises silica.

105. The method of claim 100 wherein the RNA is extracted in less than about 8 minutes.

106. The method of claim 100 wherein the RNA is extracted in less than about 6 minutes.

107. The method of claim 73, 74, 75, 76 or 77 wherein gene expression is measured by measuring the protein encoded by the gene.

108. The method of claim 107 wherein the protein is detected by an antibody specific to the protein.

109. A method of distinguishing a malignant melanocyte from a benign melanocyte comprising the steps of
a. obtaining a tissue sample; and
b. measuring the expression levels in the sample of genes recognized by the primer/probe sets selected from the group consisting of
SEQ ID NOs: 4-6 or SEQ ID NOs: 7-9 and SEQ ID NOs: 10-12 or SEQ ID NOs: 13-15; or
SEQ ID NOs: 4-6 or SEQ ID NOs: 7-9 and SEQ ID NOs: 10-12 or SEQ ID NOs: 13-15 and SEQ ID NOs: 16-18
wherein the gene expression levels above pre-determined cut-off levels are indicative of the presence of a malignant melanocyte in the sample.

110. The method of claim 109 further comprising measuring the expression level of a gene encoding tyrosinase (SEQ ID NO: 999).

111. The method of claim 109 further comprising measuring the expression level of a gene constitutively expressed in the sample.

112. The method of claim 110 wherein the gene encodes PBGD (SEQ ID NO: 979).

113. The method of claim 109 farther comprising measuring the expression levels of at least one gene encoding an mRNA corresponding to a psid selected from the group consisting of SEQ ID NOs: 29-978.

114. The method of claim 109, 110, 111, 112 or 113 wherein the sample is obtained from a lymph node.

115. The method of claim 114 wherein the lymph node is a sentinel lymph node.

116. The method of claim 109, 110, 111, 112 or 113 wherein the sample is obtained from a biopsy.

117. The method of claim 109, 110, 111, 112 or 113 wherein the method is performed intra-operatively.

118. The method of claim 109, 110, 111, 112 or 113 wherein the melanoma is a micrometastasis.

119. The method of claim 109, 110, 111, 112 or 113 wherein the specificity and sensitivity are sufficient to detect metastasis of melanoma.

120. The method of claim 119, wherein the specificity is at least 95% based on a comparison of hematoxylin and eosin (H&E) and immunohistochemical (IHC) negative nodes.

121. The method of claim 119 wherein the specificity is at least 97% based on a comparison of H&E and IHC negative nodes.

122. The method of claim 119 wherein the specificity is at least 99% based on a comparison of H&E and IHC negative nodes.

123. The method of claim 119 wherein the sensitivity is at least at least 80% based on a comparison of hematoxylin and eosin (H&E) and immunohistochemical (IHC) positive nodes.

124. The method of claim 119 wherein the sensitivity is at least 85% based on a comparison of H&E and IHC positive nodes.

125. The method of claim 119 wherein the sensitivity is at least 90% based on a comparison of H&E and IHC positive nodes.

126. The method of claim 119 wherein the specificity and sensitivity are at least 97% based on a comparison of H&E and IHC negative nodes and at least 85% based on a comparison of H&E and IHC positive nodes, respectively.

127. The method of claim 109, 110, 111, 112 or 113 wherein the pre-determined cut-off levels are at least two-fold over-expression in tissue having metastatic melanoma relative to benign melanocyte or normal tissue.

128. The method of claim 109, 110, 111, 112 or 113 wherein gene expression is measured on a microarray or gene chip.

129. The method of claim 109, 110, 111, 112 or 113 wherein gene expression is determined by nucleic acid amplification conducted by polymerase chain reaction (PCR) of RNA extracted from the sample.

130. The method of claim 129 wherein the PCR products comprise at least one of SEQ ID NOs: 25-28.

131. The method of claim 129 wherein the PCR products include fluorophores.

132. The method of claim 131 wherein the fluorophores are selected from the group consisting of Fam, Texas Red, CaI Red, Cl, Cy5 and Cy3.

133. The method of claim 132 wherein the PCR product, if present, is identified by the fluorescence pattern of PLAB: Fam; LlCAM: Texas Red or CaI Red, tyrosinase: Cl; PBGD: Cy5, where applicable.

134. The method of claim 128 wherein the PCR is reverse transcription polymerase chain reaction (RT-PCR).

135. The method of claim 134, wherein the RT-PCR further comprises one or more internal control reagents.

136. The method of claim 129 wherein RNA is extracted from the sample by:
a. homogenizing the sample to produce an homogenate;
b. contacting the homogenate with a substrate containing, or to which is affixed, an RNA-binding material;
c. allowing the RNA to bind to the RNA binding material;
d. washing the substrate under conditions sufficient to remove any contaminants, interferents and un-bound RNA; and
e. eluting bound RNA from the substrate.

137. The method of claim 109, 110, 111; 112 or 113 further comprising reducing melanin in the sample.

138. The method of claim 136 wherein melanin concentration is reduced by homogenizing the sample to produce an homogenate and passing the homogenate through a matrix to which melanin adheres, bonds, or is affixed.

139. The method of claim 136 wherein the matrix comprises polymeric beads.

140. The method of claim 136 wherein the matrix comprises silica.

141. The method of claim 136 wherein the RNA is extracted in less than about 8 minutes.

142. The method of claim 136 wherein the RNA is extracted in less than about 6 minutes.

143. The method of claim 109, 110, 111, 112 or 113 wherein gene expression is measured by measuring the protein encoded by the gene.

144. The method of claim 143 wherein the protein is detected by an antibody specific to the protein.

145. A method of determining patient treatment protocol comprising the steps of
a. obtaining a tissue sample from the patient; and
b. measuring the expression levels in the sample of genes encoding PLAB (SEQ ID NO:1) and LlCAM (SEQ ID NO:2); or
PLAB, LlCAM and NTRK3 (SEQ ID NO:3)
wherein the gene expression levels above pre-determined cut-off levels are indicative of the presence of a melanoma in the sample.

146. The method of claim 145 further comprising measuring the expression level of a gene encoding tyrosinase (SEQ ID NO: 999).

147. The method of claim 145 further comprising measuring the expression level of a gene constitutively expressed in the sample.

148. The method of claim 147 wherein the gene encodes PBGD (SEQ ID NO: 979).

149. The method of claim 145 further comprising measuring the expression levels of at least one gene encoding an mRNA corresponds to a psid selected from the group consisting of SEQ ID NOs: 29-978.

150. The method of claim 145, 146, 147, 148 or 149 wherein the sample is obtained from a lymph node.

151. The method of claim 150 wherein the lymph node is a sentinel lymph node.

152. The method of claim 145, 146, 147, 148 or 149 wherein the sample is obtained from a biopsy.

153. The method of claim 145, 146, 147, 148 or 149 wherein the method is performed intra-operatively.

154. The method of claim 145, 146, 147, 148 or 149 wherein the melanoma is a micrometastasis.

155. The method of claim 145, 146, 147, 148 or 149 wherein the specificity and sensitivity are sufficient to detect metastasis of melanoma.

156. The method of claim 155, wherein the specificity is at least 95% based on a comparison of hematoxylin and eosin (H&E) and immunohistochemical (IHC) negative nodes.

157. The method of claim 155 wherein the specificity is at least 97% based on a comparison of H&E and IHC negative nodes.

158. The method of claim 155 wherein the specificity is at least 99% based on a comparison of H&E and IHC negative nodes.

159. The method of claim 155 wherein the sensitivity is at least at least 80% based on a comparison of hematoxylin and eosin (H&E) and immunohistochemical (IHC) positive nodes.

160. The method of claim 155 wherein the sensitivity is at least 85% based on a comparison of H&E and IHC positive nodes.

161. The method of claim 155 wherein the sensitivity is at least 90% based on a comparison of H&E and IHC positive nodes.

162. The method of claim 155 wherein the specificity and sensitivity are at least 97% based on a comparison of H&E and IHC negative nodes and at least 85% based on a comparison of H&E and IHC positive nodes, respectively.

163. The method of claim 145, 146, 147, 148 or 149 wherein the pre-determined cut-off levels are at least two-fold over-expression in tissue having metastatic melanoma relative to benign melanocyte or normal tissue.

164. The method of claim 145, 146, 147, 148 or 149 wherein gene expression is measured on a microarray or gene chip.

165. The method of claim 145, 146, 147, 148 or 149 wherein gene expression is determined by nucleic acid amplification conducted by polymerase chain reaction (PCR) of RNA extracted from the sample.

166. The method of claim 165 wherein the PCR products comprise at least one of SEQ ID NOs: 25-28.

167. The method of claim 165 wherein the PCR products include fluorophores.

168. The method of claim 167 wherein the fluorophores are selected from the group consisting of Fam, Texas Red, CaI Red, Cl, Cy5 and Cy3.

169. The method of claim 168 wherein the Fluorophores correspond to PLAB: Fam; LlCAM: Texas Red or CaI Red, tyrosinase: Cl; PBGD: Cy5, where applicable.

170. The method of claim 152 wherein the PCR is reverse transcription polymerase chain reaction (RT-PCR).

171. The method of claim 170, wherein the RT-PCR further comprises one or more internal control reagents.

172. The method of claim 165 wherein RNA is extracted from the sample by:
a. homogenizing the sample to produce an homogenate;
b. contacting the homogenate with a substrate containing, or to which is affixed, an RNA-binding material;
c. allowing the RNA to bind to the RNA binding material;
d. washing the substrate under conditions sufficient to remove any contaminants, interferents and un-bound RNA; and
e. eluting bound RNA from the substrate.

173. The method of claim 145, 146, 147, 148 or 149 further comprising reducing melanin in the sample.

174. The method of claim 173 wherein melanin concentration is reduced by homogenizing the sample to produce an homogenate and passing the homogenate through a matrix to which melanin adheres, bonds, or is affixed.

175. The method of claim 174 wherein the matrix comprises polymeric beads.

176. The method of claim 174 wherein the matrix comprises silica.

177. The method of claim 172 wherein the RNA is extracted in less than about 8 minutes.

178. The method of claim 172 wherein the RNA is extracted in less than about 6 minutes.

179. The method of claim 145, 146, 147, 148 or 149 wherein gene expression is measured by measuring the protein encoded by the gene.

180. The method of claim 179 wherein the protein is detected by an antibody specific to the protein.

181. A method of determining patient treatment protocol comprising the steps of
a. obtaining a tissue sample from the patient; and
b. measuring the expression levels in the sample of genes identified by the primer/probe sets selected from the group consisting of
SEQ ID NOs: 4-6 or SEQ ID NOs: 7-9 and SEQ ID NOs: 10-12 or SEQ ID NOs: 13-15; or
SEQ ID NOs: 4-6 or SEQ ID NOs: 7-9 and SEQ ID NOs: 10-12 or SEQ ID NOs: 13-15 and SEQ ID NOs: 16-18
wherein the gene expression levels above pre-determined cut-off levels are indicative of the presence of a melanoma in the sample.

182. The method of claim 181 further comprising measuring the expression level of a gene encoding tyrosinase (SEQ ID NO: 999).

183. The method of claim 181 further comprising measuring the expression level of a gene constitutively expressed in the sample.

184. The method of claim 181 wherein the gene encodes PBGD (SEQ ID NO: 979).

185. The method of claim 184 further comprising measuring the expression levels of at least one gene encoding an mRNA correspond to a psid selected from the group consisting of SEQ ID NOs: 29-978.

186. The method of claim 181, 182, 183, 184 or 185 wherein the sample is obtained from a lymph node.

187. The method of claim 186 wherein the lymph node is a sentinel lymph node.

188. The method of claim 181, 182, 183, 184 or 185 wherein the sample is obtained from a biopsy.

189. The method of claim 181, 182, 183, 184 or 185 wherein the method is performed intra-operatively.

190. The method of claim 181, 182, 183, 184 or 185 wherein the melanoma is a micrometastasis.

191. The method of claim 181, 182, 183, 184 or 185 wherein the specificity and sensitivity are sufficient to detect metastasis of melanoma.

192. The method of claim 191, wherein the specificity is at least 95% based on a comparison of hematoxylin and eosin (H&E) and immunohistochemical (IHC) negative nodes.

193. The method of claim 191 wherein the specificity is at least 97% based on a comparison of H&E and IHC negative nodes.

194. The method of claim 191 wherein the specificity is at least 99% based on a comparison of H&E and IHC negative nodes.

195. The method of claim 191 wherein the sensitivity is at least at least 80% based on a comparison of hematoxylin and eosin (H&E) and immunohistochemical (IHC) positive nodes.

196. The method of claim 191 wherein the sensitivity is at least 85% based on a comparison of H&E and IHC positive nodes.

197. The method of claim 191 wherein the sensitivity is at least 90% based on a comparison of H&E and IHC positive nodes.

198. The method of claim 191 wherein the specificity and sensitivity are at least 97% based on a comparison of H&E and IHC negative nodes and at least 85% based on a comparison of H&E and IHC positive nodes, respectively.

199. The method of claim 181, 182, 183, 184 or 185 wherein the pre-determined cut-off levels are at least two-fold over-expression in tissue having metastatic melanoma relative to benign melanocyte or normal tissue.

200. The method of claim 181, 182, 183, 184 or 185 wherein gene expression is measured on a microarray or gene chip.

201. The method of claim 181, 182, 183, 184 or 185 wherein gene expression is determined by nucleic acid amplification conducted by polymerase chain reaction (PCR) of RNA extracted from the sample.

202. The method of claim 201 wherein the PCR products comprise at least one of SEQ ID NOs: 25-28.

203. The method of claim 201 wherein the PCR products include fluorophores.

204. The method of claim 203 wherein the fluorophores are selected from the group consisting of Fam, Texas Red, CaI Red, Cl, Cy5 and Cy3.

205. The method of claim 204 wherein the Fluorophores correspond to PLAB: Fam; LlCAM: Texas Red or CaI Red, tyrosinase: Cl; PBGD: Cy5, where applicable.

206. The method of claim 201 wherein the PCR is reverse transcription polymerase chain reaction (RT-PCR).

207. The method of claim 206, wherein the RT-PCR further comprises one or more internal control reagents.

208. The method of claim 201 wherein RNA is extracted from the sample by:
a. homogenizing the sample to produce an homogenate;
b. contacting the homogenate with a substrate containing, or to which is affixed, an RNA-binding material;
c. allowing the RNA to bind to the RNA binding material;
d. washing the substrate under conditions sufficient to remove any contaminants, interferents and un-bound RNA; and
e. eluting bound RNA from the substrate.

209. The method of claim 181, 182, 183, 184 or 185 further comprising reducing melanin in the sample.

210. The method of claim 209 wherein melanin concentration is reduced by homogenizing the sample to produce an homogenate and passing the homogenate through a matrix to which melanin adheres, bonds, or is affixed.

211. The method of claim 210 wherein the matrix comprises polymeric beads.

212. The method of claim 210 wherein the matrix comprises silica.

213. The method of claim 208 wherein the RNA is extracted in less than about 8 minutes.

214. The method of claim 208 wherein the RNA is extracted in less than about 6 minutes.

215. The method of claim 181, 182, 183, 184 or 185 wherein gene expression is measured by measuring the protein encoded by the gene.

216. The method of claim 215 wherein the protein is detected by an antibody specific to the protein.

217. A composition comprising at least one primer/probe set selected from the group consisting of: SEQ ID NOs: 4-6, SEQ ID NOs: 7-9, SEQ ID NO:46-48, SEQ ID NOs: 13-15, SEQ ID NOs: 16-18, SEQ ID NOs: 19-21, and SEQ ID NOs: 22-24.

218. A composition comprising at least one amplicon selected from the group consisting of SEQ ID NOs: 25-28.

219. A kit for conducting an assay to determine the presence of melanoma in a tissue sample comprising: nucleic acid amplification and detection reagents.

220. The kit of claim 219 wherein the reagents comprise primers having sequences for detecting the expression of at least one gene encoding an mRNA selected from the group consisting of SEQ ID NOs: 1-3.

221. The kit of claim 219 comprising RT-PCR reagents.
